(19) United States
(12) Patent Application Publication
(10) Pub. No.: US 2022/0377995 A1
(43) Pub. Date: Dec. 1, 2022

(54) ALTERATION OF FLAVOR TRAITS IN CONSUMER CROPS VIA DISABLEMENT OF THE MYROSINASE/GLUCOSINOLATE SYSTEM

(71) Applicant: PAIRWISE PLANTS SERVICES, INC., Durham, NC (US)

(72) Inventors: Dale Karlson, Cary, NC (US); HaeJin Kim, Durham, NC (US); Thomas J. Poorten, Durham, NC (US); Julius Mojica, Durham, NC (US)

(21) Appl. No.: 17/634,694

(22) PCT Filed: Aug. 14, 2020
(86) PCT No.: PCT/US2020/046483

§ 371 Date: Feb. 11, 2022

Related U.S. Application Data
(60) Provisional application No. 62/886,458, filed on Aug. 14, 2019.

(51) Int. Cl. A01H 1/00; A01H 6/20; C12N 15/82

(52) U.S. Cl. CPC A01H 1/101; A01H 6/20; C12N 15/8201; C12N 2310/20

(57) ABSTRACT

The present invention is directed to methods and compositions for breeding plants with an altered flavor or odor profile. Particularly, next generation plant breeding technologies are utilized for producing plants with target genes edited to reduce pungency in flavor or odor. The breeding method is capable of producing mustard plants in which the mustard bomb reaction is disarmed and/or plants with a reduced pungency and/or bitterness in flavor and/or odor.

### PRIORITY

[0001] This application claims the benefit, under 35 U.S.C. § 119 (e), of U.S. Provisional Application No. 62/886,458 filed on August 14, 2019, the entire contents of which is incorporated by reference herein.

### STATEMENT REGARDING ELECTRONIC FILING OF A SEQUENCE LISTING

[0002] A Sequence Listing in ASCII text format, submitted under 37 C.F.R. § 1.821, entitled 1499-40WO_ST25.txt, 1,312,790 bytes in size, generated on Aug. 14, 2020 and filed via EFS-Web, is provided in lieu of a paper copy. This Sequence Listing is hereby incorporated herein by reference into the specification for its disclosures.

### FIELD

[0003] The present invention is directed to next generation plant breeding to provide desired traits to consumer crops, particularly a reduced pungent flavor, bitterness flavor, and/or odor traits.

### BACKGROUND

[0004] Vegetables play an important role in food and nutritional security. Particularly, green leafy vegetables are considered an exceptional source for vitamins, minerals, and phenolic compounds.

[0005] Mineral nutrients like iron and calcium are higher in leafy vegetables than staple food grains. However, the Centers for Disease Control and Prevention (CDC) recently reported that just 1 in 10 adults meet the daily intake recommendations for fruits and vegetables. For consumers, multiple potential barriers exist for the consumption of fresh produce options, such as: cost, convenience, availability, and palatability/taste of the fresh produce. Among fresh produce, lettuce is commonly used as a major component for salads and provides additive options for sandwiches and burgers. Although lettuce is broadly available and commonly purchased by consumers, it lacks in nutrition value relative to other leafy green vegetables.

[0006] In recent years, leafy green vegetables such as kale have gained popularity as ‘superfoods’ and serve as a nutrient dense vegetable source for health-conscious consumers. In southern states, turnip and mustard greens, and collards are a common part of the diet. However, in order to minimize undesirable attributes associated with leafy greens, such as fibrous/tough leaves, bitterness, frilly textures and/or pungency, consumers often cook down the leafy greens to soften tissues and alter flavor/odor profiles with the incorporation of fats and other ingredients. Consequently, many of the nutrient-related benefits are reduced, as a result of the cooking process, and consumers are deprived from many of the direct benefits of consuming the fresh produce to begin with.

[0007] Among the most nutrient dense leafy green options available for consumers, mustard greens (Brassica juncea), are characterized by intraspecific diversity with variation of leaf traits such as color, size, texture, and heading morphology. If eaten fresh, mustard greens are pungent due to a reaction of myrosinase enzyme with its glucosinolate substrate, also known as ‘mustard bomb.’ Consequently, mustard greens are either cooked to minimize pungency, or consumed fresh in smaller quantities, or as baby greens.

[0008] Therefore, the present invention is directed to modifying undesirable attributes of plants, such as mustard greens, to increase consumption of fresh healthy leafy greens and fresh produce.

### SUMMARY

[0009] The present disclosure provides a novel plant breeding method for promoting fresh green leafy plants for human consumption. The breeding method is capable of producing mustard plants in which the mustard bomb reaction is disarmed and/or plants with a reduced pungency and/or bitterness in flavor and/or odor. The present disclosure provides modification of genomic targets genetically associated with flavor and/or odor traits, in plants of interest, by, for example, gene editing systems as taught herein. Thus, gene editing methods are adopted to precisely manipulate genomic targets, which allow for production of mustard plants with a less pungent and/or less bitter flavor and/or odor, which will increase consumption of for example, leafy green vegetables by consumers. Furthermore, the present disclosure also teaches a method of producing gene-edited plants that are free from a foreign DNA and/or transgene(s).

[0010] One aspect of the invention provides a mustard (e.g., Brassica) plant or part thereof comprising at least one non-natural mutation in an endogenous gene encoding a cytochrome P450 mono-oxygenase (i.e., CYP79F1, homomethionine N-monooxygenase; EC 1.14.14.42), an endogenous gene encoding a 2-oxo acid-dependent dioxygenase (i.e., AOP2, 2-oxoglutarate-dependent dioxygenase; EC 1.14.11.M8) and/or an endogenous gene encoding a myrosinase (i.e., glucosinolase, thioglucosidase (e.g., β-thioglucosidase), thioglucoside glucohydrolase; EC 3.2.1.147 (EC 3.2.3.1 transferred to 3.2.1.147)). A mustard plant may have more than one copy of a myrosinase gene, with at least one (e.g., 1, 2, 3, 4 or more) of the myrosinase genes comprising one or more mutations (e.g., 1, 2, 3, 4, or more mutations). A mustard plant may have more than one copy of an AOP2 gene, with at least one (e.g., 1, 2, 3, 4 or more) of the AOP2 genes comprising one or more mutations (e.g., 1, 2, 3, 4, or more mutations).

[0011] A second aspect of the invention provides a mustard plant cell, comprising an editing system comprising: (a) a CRISPR-associated effector protein; and (b) a guide nucleic acid (gRNA, gDNA, crRNA, crDNA, sgRNA, sgDNA) comprising a spacer sequence with complementarity to an endogenous target gene encoding a CYP79F1, an endogenous target gene encoding an AOP2, and/or an endogenous target gene encoding an myrosinase.

[0012] A third aspect of the invention provides a mustard plant or part thereof (e.g., a plant cell) having reduced pungency or bitterness in flavor and/or odor (e.g., reduced hydrolysis of glucosinolates and/or reduced amounts/production of alkenyl glucosinolates and/or aliphatic glucosinolates) (as compared to a plant not comprising the edit and grown under the same conditions) comprising at least one non-natural mutation an endogenous myrosinase gene, an endogenous AOP2 gene and/or an endogenous CYP79F1 gene, wherein the at least one mutation is a substitution, insertion or a deletion that is introduced using an editing system that comprises a nucleic acid binding domain that binds to a target site in the endogenous myrosinase gene, in the endogenous AOP2 gene or in the endogenous CYP79F1 gene.

[0013] A fourth aspect of the invention provides a method of producing/breeding a transgene-free edited mustard plant, comprising: crossing the mustard plant of the invention with a transgene free mustard plant, thereby introducing the at least one non-natural mutation into the mustard plant that is transgene-free; and selecting a progeny mustard plant that comprises the at least one non-natural mutation and is transgene-free, thereby producing a transgene free edited mustard plant.

[0014] A fifth aspect of the invention provides a method of providing a plurality of mustard plants exhibiting reduced pungency or bitterness, the method comprising planting two or more plants of any one of claim 1 to 21 or 24-42 in a growing area (e.g., a field (e.g., a cultivated field, an agricultural field), a growth chamber, a greenhouse, a recreational area, a lawn, and/or a roadside and the like), thereby providing a plurality of mustard plants exhibiting reduced pungency or bitterness as compared to a plurality of control mustard plants not comprising the mutation and grown under the same conditions.

[0015] A sixth aspect of the invention provides a method of generating variation in a mustard myrosinase gene, an AOP2 gene and/or a CYP79F1 gene, comprising: introducing an editing system into a mustard plant cell, wherein the editing system is targeted to a region of the myrosinase gene, a region of the AOP2 gene, and/or the region of a CYP79F1 gene; and contacting the region of the myrosinase gene, of the AOP2 gene and/or the CYP79F1 gene with the editing system, thereby introducing a mutation into the myrosinase gene, the AOP2 gene, and/or the CYP79F1 gene and generating variation in the mustard myrosinase gene, AOP2 gene and/or CYP79F1 gene.

[0016] A seventh aspect of the invention provides a method for editing a specific site in the genome of a mustard plant cell, the method comprising: cleaving, in a site specific manner, a target site within an endogenous myrosinase gene, an endogenous AOP2 gene and/or an endogenous CYP79F1 gene, thereby generating an edit in the endogenous myrosinase gene, the endogenous AOP2 gene and/or the endogenous CYP79F1 gene of the plant cell.

[0017] An eighth aspect provides a method for making a mustard plant, comprising: (a) contacting a population of mustard plant cells comprising a DNA sequence that encodes a wild type endogenous myrosinase, a wild type endogenous AOP2 and/or a wild type endogenous CYP79F1 with a nuclease linked to a DNA binding domain (e.g., editing system) that binds to a target sequence in the wild type endogenous myrosinase, the wild type endogenous AOP2 or the wild type endogenous CYP79F1, (b) selecting a mustard plant cell from said population in which at least one DNA sequence encoding the wild type endogenous myrosinase, the wild type endogenous AOP2 and/or the wild type endogenous CYP79F1 has been mutated, wherein the mutation comprises a deletion of at least one nucleotide in the at least one DNA sequence; and (c) growing the selected plant cell into a mustard plant.

[0018] A ninth aspect provides a method for reducing pungency and/or bitterness in flavor or aroma in a mustard plant or part thereof, comprising (a) contacting a mustard plant cell comprising a wild type endogenous myrosinase gene, a wild type endogenous AOP2 gene and/or a wild type endogenous CYP79F1 gene with a nuclease targeting the wild type endogenous myrosinase gene, the wild type endogenous AOP2 gene or the wild type endogenous CYP79F1 gene, wherein the nuclease is linked to a DNA binding domain that binds to a target site in the wild type endogenous myrosinase gene, the wild type endogenous AOP2 gene or the wild type endogenous CYP79F1 gene to produce a plant cell comprising a mutation in the wild type endogenous myrosinase gene, the wild type endogenous AOP2 gene or the wild type endogenous CYP79F1 gene; and (b) growing the plant cell into a plant comprising the mutation in the wild type endogenous myrosinase gene, the wild type endogenous AOP2 gene and/or the wild type endogenous CYP79F1 gene, thereby reducing pungency and/or bitterness in flavor or aroma in a mustard plant or part thereof.

[0019] A tenth aspect provides method for producing a mustard plant having a phenotype of reduced pungency and/or reduced bitterness, comprising (a) contacting a mustard plant cell comprising a wild type endogenous myrosinase gene, a wild type endogenous AOP2 gene and/or a wild type endogenous CYP79F1 gene with a nuclease targeting the wild type endogenous myrosinase gene, the wild type endogenous AOP2 gene or the wild type endogenous CYP79F1 gene, wherein the nuclease is linked to a DNA binding domain that binds to a target site in the wild type endogenous wild type endogenous myrosinase gene, the wild type endogenous AOP2 gene or the wild type endogenous CYP79F1 gene, (b) growing the plant cell into a mustard plant, thereby producing a mustard plant having a phenotype of reduced pungency and/or reduced bitterness as compared to a plant not comprising the edit and grown under the same conditions.

[0020] An eleventh aspect of the invention provides a method for producing a mustard plant or part thereof comprising at least one cell having a mutated endogenous myrosinase gene, a mutated endogenous AOP2 gene and/or a mutated endogenous CYP79F1 gene, the method comprising contacting a target site in an endogenous myrosinase gene, an endogenous AOP2 gene and/or an endogenous CYP79F1 gene in the mustard plant or plant part with a nuclease comprising a cleavage domain and a DNA-binding domain, wherein the DNA binding domain binds to a target site in the endogenous myrosinase gene, the endogenous AOP2 gene and/or the endogenous CYP79F1 gene, thereby producing the plant or part thereof comprising at least one cell having a mutated endogenous myrosinase gene, a mutated endogenous AOP2 gene and/or a mutated endogenous CYP79F1 gene.

[0021] A twelfth aspect of the invention provides a method of producing a mustard plant or part thereof comprising a mutated endogenous myrosinase gene, a mutated endogenous AOP2 gene and/or a mutated endogenous CYP79F1 gene and having a phenotype of reduced pungency and/or bitterness, the method comprising contacting a target site in an endogenous myrosinase gene, an endogenous AOP2 gene and/or an endogenous CYP79F1 gene with a nuclease comprising a cleavage domain and a DNA binding domain (e.g., editing system) comprising a nucleic acid binding domain that binds to the target site in the endogenous myrosinase gene, the endogenous AOP2 gene and/or the endogenous CYP79F1 gene, thereby producing a mustard plant or part thereof comprising a mutated endogenous myrosinase gene, a mutated endogenous AOP2 gene and/or a mutated endogenous CYP79F1 gene and having reduced pungency and/or bitterness as compared to a plant not comprising the edit and grown under the same conditions.

[0022] A thirteenth aspect provides a guide nucleic acid (e.g., gRNA, gDNA, crRNA, crDNA) that binds to a target site in an endogenous myrosinase gene, in an endogenous AOP2 gene or in an endogenous CYP79F1 gene.

[0023] In a fourteenth aspect, a system is provided comprising a guide nucleic acid of the invention and a CRISPR-Cas effector protein that associates with the guide nucleic acid of the invention.

[0024] A fifteenth aspect provides a gene editing system comprising a CRISPR-Cas effector protein in association with a guide nucleic acid, wherein the guide nucleic acid comprises a spacer sequence that binds to an endogenous myrosinase gene, an endogenous AOP2 gene or an endogenous CYP79F1 gene.

[0025] In a sixteenth aspect, a complex comprising a CRISPR-Cas effector protein comprising a cleavage domain and a guide nucleic acid, wherein the guide nucleic acid binds to a target site in an endogenous myrosinase gene, in an endogenous AOP2 gene or in an endogenous CYP79F1 gene, wherein the cleavage domain cleaves a target strand in the endogenous myrosinase gene, in the endogenous AOP2 gene or in the endogenous CYP79F1 gene.

[0026] In a seventeenth aspect, an expression cassette is provided, the expression cassette comprising a (a) polynucleotide encoding CRISPR-Cas effector protein comprising a cleavage domain and (b) a guide nucleic acid that binds to a target site in an endogenous myrosinase gene, in an endogenous AOP2 gene or in an endogenous CYP79F1 gene.

[0027] An eighteenth aspect of the invention provides a nucleic encoding a null allele of a myrosinase, a CYP79F1 or an AOP2.

[0028] In an additional aspect, a mustard plant or part thereof is provided comprising a nucleic acid of the invention.

[0029] In a further aspect, a mustard plant or part thereof is provided that exhibits reduced pungency and/or reduced bitterness in flavor and/or aroma as compared to a plant (or part thereof) not comprising the edit and grown under the same conditions.

[0030] Further provided are mustard plants comprising in their genome one or more mutated myrosinase genes, one or more mutated AOP2 genes and/or a CYP79F1 gene produced by the methods of the invention as well as polypeptides, polynucleotides, nucleic acid constructs, expression cassettes and vectors for making a plant of this invention.

[0031] These and other aspects of the invention are set forth in more detail in the description of the invention below.

### Brief Description of the Sequences

[0032] SEQ ID NOs:1-17 are exemplary Cas12a amino acid sequences useful with this invention.

[0033] SEQ ID NOs:18-20 are exemplary Cas12a nucleotide sequences useful with this invention.

[0034] SEQ ID NO:21-22 are exemplary regulatory sequences encoding a promoter and intron.

[0035] SEQ ID NOs:23-29 are exemplary cytosine deaminase sequences useful with this invention.

[0036] SEQ ID NOs:30-34 are exemplary adenine deaminase amino acid sequences useful with this invention.

[0037] SEQ ID NO:35 is an exemplary uracil-DNA glycosylase inhibitor (UGI) sequences useful with this invention.

[0038] SEQ ID NOs:36-38 provides an example of a protospacer adjacent motif position for a Type V CRISPR-Cas12a nuclease.

[0039] SEQ ID NOs:39-41 provide example peptide tags and affinity polypeptides useful with this invention.

[0040] SEQ ID NOs:42-52 provide example RNA recruiting motifs and corresponding affinity polypeptides useful with this invention.

[0041] SEQ ID NOs:53-54 are exemplary Cas9 polypeptide sequences useful with this invention.

[0042] SEQ ID NOs:55-65 are exemplary Cas9 polynucleotide sequences useful with this invention.

[0043] SEQ ID NOs:66-78 are example wild type myrosinase genomic sequences (cdna).

[0044] SEQ ID NOs:79-92 are example wild type myrosinase coding sequences (cds).

[0045] SEQ ID NOs:93-105 are example wild type myrosinase polypeptides.

[0046] SEQ ID NOs:106-112 are example CRISPR guides targeting myrosinase genes.

[0047] SEQ ID NO:113 is an example wild type CYP79F1 genomic sequence (cdna).

[0048] SEQ ID NO:114 is an example wild type CYP79F1 coding sequence (cds).

[0049] SEQ ID NO:115 is an example wild type CYP79F1 polypeptide.

[0050] SEQ ID NOs:116-117 are example CRISPR guides targeting CYP79F1 genes.

[0051] SEQ ID NOs:118-122 are example wild type AOP2 genomic sequences (cdna).

[0052] SEQ ID NOs:123-127 are example wild type AOP2 coding sequences (cds).

[0053] SEQ ID NOs:128-132 are example wild type AOP2 polypeptides.

[0054] SEQ ID NOs:133-140 are example CRISPR guides targeting AOP2 genes.

[0055] SEQ ID NOs: 141-599 are example edited regions of myrosinase polynucleotide sequences.

[0056] SEQ ID NOs:600-616 are example edited regions of AOP2 polynucleotide sequences.

[0057] SEQ ID NOs:617-658 are example wild type myrosinase polypeptide sequences.

[0058] SEQ ID NOs:659-673 are example wild type AOP2 polypeptide sequences.

[0059] SEQ ID NOs:674-679 are example wild type CYP79F1 polypeptide sequences.

[0060] SEQ ID NOs:680-721 are example wild type myrosinase polynucleotide sequences (cDNA).

[0061] SEQ ID NOs:722-736 are example wild type AOP2 polynucleotide sequences (cDNA).

[0062] SEQ ID NOs:737-742 are example wild type CYP79F1 polynucleotide sequences (cDNA).

[0063] SEQ ID NOs: 743-775 are example myrosinase orthologs.

[0064] SEQ ID NOs: 776-781 are example AOP2 orthologs.

[0065] SEQ ID NOs: 782-787 are example CYP79F1 orthologs.

[0066] SEQ ID NOs:788-799 are example edited regions of CYP79F1 polynucleotide sequences.

[0067] SEQ ID NOs:800-816 are example edited regions of AOP2 polynucleotide sequences.

### BRIEF DESCRIPTION OF THE FIGURES

[0068] FIG. 1 provides thirteen example myrosinase genes from Brassica juncea with aligned example guides.

[0069] FIG. 2 provides an example myrosinase gene from Brassica juncea with example aligned guides.

[0070] FIG. 3 provides five example AOP2 genes from Brassica juncea with aligned example guides.

[0071] FIG. 4 provides an example AOP2 gene from Brassica juncea with aligned example guides.

[0072] FIG. 5 provides an example CYP79F1 gene from Brassica juncea with aligned example guides.

[0073] FIG. 6 illustrates glucosinolate metabolism by myrosinase and production of thioglucoside N-hydrosulfate.

[0074] FIG. 7 provides a cartoon of an example strategy for reducing the pungency in a plant through myrosinase knock-out. As shown, the end products may be used as a measure of the reduction in myrosinase activity and the reduction in pungency.

[0075] FIG. 8 illustrates colorimetric detection of myrosinase activity via detection of glucose. Range of glucose detection was prepared by evaluating a standard curve of various glucose concentrations. Leaf material (mustard) naturally containing myrosinase/glucosinolate reaction system (mustard) are compared with leaf material (soy) which lacks the reaction capabilities.

[0076] FIG. 9 shows the glucose release assay absorbance (mean and standard error of the mean) (SEM)) for 11 edited myrosinase genes versus reference wild-type genes.

[0077] FIG. 10 provides the same information as FIG. 9 in a different format.

### DETAILED DESCRIPTION

[0078] Recent breeding efforts have focused on the development of new oilseed feedstock crop for biofuels (e.g. ethanol, biodiesel, bio-jet fuel), bio-industrial uses (e.g., bio-plastics, lubricants) and specialty fatty acids (e.g., erucic acid). Its limitation as a feed additive is its relatively high content of glucosinolate. Thus, the Brassica plants such as, Brassica carinata, Brassica napus, Brassica rapa and Brassica juncea, have been bred for low glucosinolate levels for oilseed and feed meal production for animal consumption. Using conventional plant breeding methods and/or genetic engineering techniques such as T-DNA insertion and RNAi, most efforts have focused on breeding low glucosinolate varieties for oil seed production and for feed for animals and livestock. However, these efforts have not been aimed at promoting fresh leafy greens for human consumption.

[0079] The present disclosure provides a method for the production of mustard plants (i.e., Brassicaceae plants), which maintains good nutritional values and impose less pungent and/or bitter flavor and/or odor traits to boost human consumption of, for example, fresh leafy green vegetables. Especially, the disclosure teaches prevention of the aforementioned ‘mustard bomb’ reaction, which minimizes pungency. The present disclosure provides a solution to produce gene-edited mustard plants giving rise to a desired trait such as a reduced pungency and/or reduced bitterness. Also, the present disclosure provides compositions, methods, and products related to the modification of plant cells to reduce pungency and/or bitterness and induce pleasant flavor and/or odor by disarming the mustard bomb reaction taught herein in an effort to promote consumption of fresh super greens, resulting in the gain of nutritional benefits from the fresh produce.

[0080] The present invention now will be described hereinafter with reference to the accompanying drawings and examples, in which embodiments of the invention are shown. This description is not intended to be a detailed catalog of all the different ways in which the invention may be implemented, or all the features that may be added to the instant invention. For example, features illustrated with respect to one embodiment may be incorporated into other embodiments, and features illustrated with respect to a particular embodiment may be deleted from that embodiment. Thus, the invention contemplates that in some embodiments of the invention, any feature or combination of features set forth herein can be excluded or omitted. In addition, numerous variations and additions to the various embodiments suggested herein will be apparent to those skilled in the art in light of the instant disclosure, which do not depart from the instant invention. Hence, the following descriptions are intended to illustrate some particular embodiments of the invention, and not to exhaustively specify all permutations, combinations and variations thereof.

[0081] Unless otherwise defined, all technical and scientific terms used herein have the same meaning as commonly understood by one of ordinary skill in the art to which this invention belongs. The terminology used in the description of the invention herein is for the purpose of describing particular embodiments only and is not intended to be limiting of the invention.

[0082] All publications, patent applications, patents and other references cited herein are incorporated by reference in their entireties for the teachings relevant to the sentence and/or paragraph in which the reference is presented.

[0083] Unless the context indicates otherwise, it is specifically intended that the various features of the invention described herein can be used in any combination. Moreover, the present invention also contemplates that in some embodiments of the invention, any feature or combination of features set forth herein can be excluded or omitted. To illustrate, if the specification states that a composition comprises components A, B and C, it is specifically intended that any of A, B or C, or a combination thereof, can be omitted and disclaimed singularly or in any combination.

[0084] The term “a” or “an” refers to one or more of that entity, i.e., can refer to a plural referent. As such, the terms “a” or “an”, “one or more” and “at least one” are used interchangeably herein. In addition, reference to “an element” by the indefinite article “a” or “an” does not exclude the possibility that more than one of the elements is present, unless the context clearly requires that there is one and only one of the elements.

[0085] As used in this specification, the term “and/or” is used in this disclosure to mean either “and” or “or” unless indicated otherwise and encompasses any and all possible combinations of one or more of the associated listed items, as well as the lack of combinations when interpreted in the alternative (“or”).

[0086] The term “comprise,” “comprises” and “comprising” as used herein, specify the presence of the stated features, integers, steps, operations, elements, and/or components, but do not preclude the presence or addition of one or more other features, integers, steps, operations, elements, components, and/or groups thereof.

[0087] As used herein, the transitional phrase “consisting essentially of” means that the scope of a claim is to be interpreted to encompass the specified materials or steps recited in the claim and those that do not materially affect the basic and novel characteristic(s) of the claimed invention. Thus, the term “consisting essentially of” when used in a claim of this invention is not intended to be interpreted to be equivalent to “comprising.”

[0088] As used in this application, the terms “about” and “approximately” are used as equivalents. Any numerals used in this application with or without about/approximately are meant to cover any normal fluctuations appreciated by one of ordinary skill in the relevant art. In certain embodiments, the term “approximately” or “about” refers to a range of values that fall within 10%, 9%, 8%, 7%, 6%, 5%, 4%, 3%, 2%, 1%, or less in either direction (greater than or less than) of the stated reference value unless otherwise stated or otherwise evident from the context (except where such number would exceed 100% of a possible value). Thus, the term “about,” as used herein when referring to a measurable value such as an amount or concentration and the like, is meant to encompass variations of ±10%, ±5%, ±1%, ±0.5%, or even ±0.1% of the specified value as well as the specified value. For example, “about X” where X is the measurable value, is meant to include X as well as variations of ±10%, ±5%, ±1%, ±0.5%, or even ±0.1% of X. A range provided herein for a measureable value may include any other range and/or individual value therein.

[0089] As used herein, phrases such as “between X and Y” and “between about X and Y” should be interpreted to include X and Y. As used herein, phrases such as “between about X and Y” mean “between about X and about Y” and phrases such as “from about X to Y” mean “from about X to about Y.”

[0090] Recitation of ranges of values herein are merely intended to serve as a shorthand method of referring individually to each separate value falling within the range, unless otherwise indicated herein, and each separate value is incorporated into the specification as if it were individually recited herein. For example, if the range 10 to15 is disclosed, then 11, 12, 13, and 14 are also disclosed.

[0091] As used herein, the terms “increase,” “increasing,” “increased,” “enhance,” “enhanced,” “enhancing,” and “enhancement” (and grammatical variations thereof) describe an elevation of at least about 5%, 10%, 15%, 20%, 25%, 50%, 75%, 100%, 150%, 200%, 300%, 400%, 500% or more as compared to a control.

[0092] As used herein, the terms “reduce,” “reduced,” “reducing,” “reduction,” “diminish,” and “decrease” (and grammatical variations thereof), describe, for example, a decrease of at least about 5%, 10%, 15%, 20%, 25%, 35%, 50%, 75%, 80%, 85%, 90%, 95%, 96%, 97%, 98%, 99%, 99.5%, 99.6%, 99.7%, 99.8%, 99.9%, or 100% as compared to a control. In particular embodiments, the reduction can result in no or essentially no (i.e., an insignificant amount, e.g., less than about 10% or even 5%) detectable activity or amount. For example, a plant comprising a mutation in gene encoding a enzyme involved in glucosinolate metabolism (biosynthesis or catabolism (e.g., glucosinolate breakdown) as described herein (e.g., myrosinase, AOP2, and/or CYP79F1 can exhibit reduced pungency and/or reduced bitterness that is reduced as compared to a plant when grown under the same environmental conditions.

[0093] As used herein, the terms “express,” “expresses,” “expressed” or “expression,” and the like, with respect to a nucleic acid molecule and/or a nucleotide sequence (e.g., RNA or DNA) indicates that the nucleic acid molecule and/or a nucleotide sequence is transcribed and, optionally, translated. Thus, a nucleic acid molecule and/or a nucleotide sequence may express a polypeptide of interest or, for example, a functional untranslated RNA.

[0094] The terms “genetically engineered host cell,” “recombinant host cell,” and “recombinant strain” are used interchangeably herein and refer to host cells that have been genetically engineered by the methods of the present disclosure. Thus, the terms include a host cell (e.g., bacteria, yeast cell, fungal cell, CHO, human cell, plant cell, protoplast derived from plant, callus, etc.) that has been genetically altered, modified, or engineered, such that it exhibits an altered, modified, or different genotype and/or phenotype (e.g., when the genetic modification affects coding nucleic acid sequences), as compared to the naturally-occurring host cell from which it was derived. It is understood that the terms refer not only to the particular recombinant host cell in question, but also to the progeny or potential progeny of such a host cell.

[0095] The term “genetically engineered” may refer to any manipulation of a host cell's genome (e.g. by insertion or deletion of nucleic acids).

[0096] The term “next generation plant breeding” refers to a host of plant breeding tools and methodologies that are available to today's breeder. A key distinguishing feature of next generation plant breeding is that the breeder is no longer confined to relying upon observed phenotypic variation, in order to infer underlying genetic causes for a given trait. Rather, next generation plant breeding may include the utilization of molecular markers and marker assisted selection (MAS), such that the breeder can directly observe movement of alleles and genetic elements of interest from one plant in the breeding population to another, and is not confined to merely observing phenotype. Further, next generation plant breeding methods are not confined to utilizing natural genetic variation found within a plant population. Rather, the breeder utilizing next generation plant breeding methodology can access a host of modern genetic engineering tools that directly alter/change/edit the plant's underlying genetic architecture in a targeted manner, in order to bring about a phenotypic trait of interest. In aspects, the plants bred with a next generation plant breeding methodology are indistinguishable from a plant that was bred in a traditional manner, as the resulting end product plant could theoretically be developed by either method. In particular aspects, a next generation plant breeding methodology may result in a plant that comprises: a genetic modification that is a deletion of any size (e.g., resulting in a truncation); a genetic modification that is a single base pair substitution; a genetic modification that is an introduction of nucleic acid sequences from within the plant's natural gene pool (e.g. any plant that could be crossed or bred with a plant of interest) or from editing of nucleic acid sequences in a plant to correspond to a sequence known to occur in the plant's natural gene pool; and offspring of said plants.

[0097] The term “traditional plant breeding” refers to the utilization of natural variation found within a plant population as a source for alleles and genetic variants that impart a trait of a interest to a given plant. Traditional breeding methods make use of crossing procedures that rely largely upon observed phenotypic variation to infer causative allele association. That is, traditional plant breeding relies upon observations of expressed phenotype of a given plant to infer underlying genetic cause. These observations are utilized to inform the breeding procedure in order to move allelic variation into germplasm of interest. Further, traditional plant breeding has also been characterized as comprising random mutagenesis techniques, which can be used to introduce genetic variation into a given germplasm. These random mutagenesis techniques may include chemical and/or radiation-based mutagenesis procedures. Consequently, one key feature of traditional plant breeding, is that the breeder does not utilize a genetic engineering tool that directly alters/changes/edits the plant's underlying genetic architecture in a targeted manner, in order to introduce genetic diversity and bring about a phenotypic trait of interest.

[0098] The terms “polynucleotide,” “nucleic acid,” and “nucleotide sequence,” used interchangeably herein, refers to a polymeric form of nucleotides of any length, either ribonucleotides or deoxyribonucleotides, or analogs thereof. This term refers to the primary structure of the molecule, and thus includes double- and single-stranded DNA, as well as double- and single-stranded RNA. This term includes, but is not limited to, single-, double-, or multistranded DNA or RNA, genomic DNA, cDNA, DNA-RNA hybrids, or a polymer comprising purine and pyrimidine bases or other natural, chemically or biochemically modified, non-natural, or derivatized nucleotide bases. It also includes modified nucleic acids such as methylated and/or capped nucleic acids, nucleic acids containing modified bases, backbone modifications, and the like. “Oligonucleotide” generally refers to polynucleotides of between about 5 and about 100 nucleotides of single- or double-stranded DNA. However, for the purposes of this disclosure, there is no upper limit to the length of an oligonucleotide. Oligonucleotides are also known as “oligomers” or “oligos” and may be isolated from genes, or chemically synthesized by methods known in the art. The terms “polynucleotide” “nucleic acid,” and “nucleotide sequence” should be understood to include, as applicable to the embodiments being described, single-stranded (such as sense or antisense) and double-stranded polynucleotides.

[0099] The terms “peptide,” “polypeptide,” and “protein” are used interchangeably herein, and refer to a polymeric form of amino acids of any length, which can include coded and non-coded amino acids, chemically or biochemically modified or derivatized amino acids, and polypeptides having modified peptide backbones.

[0100] A “native” or “wild type” nucleic acid, nucleotide sequence, polypeptide or amino acid sequence refers to a naturally occurring or endogenous nucleic acid, nucleotide sequence, polypeptide or amino acid sequence. Thus, for example, a “wild type endogenous myrosinase gene” is myrosinase gene that is naturally occurring in or endogenous to the reference organism, e.g., a mustard plant.

[0101] As used herein, the term “heterozygous” refers to a genetic status wherein different alleles reside at corresponding loci on homologous chromosomes.

[0102] As used herein, the term “homozygous” refers to a genetic status wherein identical alleles reside at corresponding loci on homologous chromosomes.

[0103] As used herein, the term “allele” refers to one of two or more different nucleotides or nucleotide sequences that occur at a specific locus.

[0104] A “null allele” is a nonfunctional allele caused by a genetic mutation that results in a complete lack of production of the corresponding protein or produces a protein that is non-functional.

[0105] A “dominant negative mutation” is a mutation that produces an altered gene product (e.g., having an aberrant function relative to wild type), which gene product adversely affects the function of the wild-type allele or gene product. For example, a “dominant negative mutation” may block a function of the wild type gene product. A dominant negative mutation may also be referred to as an “antimorphic mutation.”

[0106] A “semi-dominant mutation” refers to a mutation in which the penetrance of the phenotype in a heterozygous organism is less than that observed for a homozygous organism.

[0107] A “weak loss-of-function mutation” is a mutation that results in a gene product having partial function or reduced function (partially inactivated) as compared to the wildtype gene product.

[0108] A “hypomorphic mutation” is a mutation that results in a partial loss of gene function, which may occur through reduced expression (e.g., reduced protein and/or reduced RNA) or reduced functional performance (e.g., reduced activity), but not a complete loss of function/activity. A “hypomorphic” allele is a semi-functional allele caused by a genetic mutation that results in production of the corresponding protein that functions at anywhere between 1% and 99% of normal efficiency.

[0109] As used herein, the terms “desired allele,” “target allele” and/or “allele of interest” are used interchangeably to refer to an allele associated with a desired trait. In some embodiments, a desired allele may be associated with either an increase or a decrease (relative to a control) of or in a given trait, depending on the nature of the desired phenotype.

[0110] A marker is “associated with” a trait when said trait is linked to it and when the presence of the marker is an indicator of whether and/or to what extent the desired trait or trait form will occur in a plant/germplasm comprising the marker. Similarly, a marker is “associated with” an allele or chromosome interval when it is linked to it and when the presence of the marker is an indicator of whether the allele or chromosome interval is present in a plant/germplasm comprising the marker.

[0111] As used herein, the terms “backcross” and “backcrossing” refer to the process whereby a progeny plant is crossed back to one of its parents one or more times (e.g., 1, 2, 3, 4, 5, 6, 7, 8, etc.). In a backcrossing scheme, the “donor” parent refers to the parental plant with the desired gene or locus to be introgressed. The “recipient” parent (used one or more times) or “recurrent” parent (used two or more times) refers to the parental plant into which the gene or locus is being introgressed. For example, see Ragot, M. et al. Marker-assisted Backcrossing: A Practical Example, in TECHNIQUES ET UTILISATIONS DES MARQUEURS MOLECULAIRES LES COLLOQUES, Vol. 72, pp. 45-56 (1995); and Openshaw et al., Marker-assisted Selection in Backcross Breeding, in PROCEEDINGS OF THE SYMPOSIUM “ANALYSIS OF MOLECULAR MARKER DATA,” pp. 41-43 (1994). The initial cross gives rise to the F1 generation. The term “BC1” refers to the second use of the recurrent parent, “BC2” refers to the third use of the recurrent parent, and so on.

[0112] As used herein, the terms “cross” or “crossed” refer to the fusion of gametes via pollination to produce progeny (e.g., cells, seeds or plants). The term encompasses both sexual crosses (the pollination of one plant by another) and selfing (self-pollination, e.g., when the pollen and ovule are from the same plant). The term “crossing” refers to the act of fusing gametes via pollination to produce progeny.

[0113] As used herein, the terms “introgression,” “introgressing” and “introgressed” refer to both the natural and artificial transmission of a desired allele or combination of desired alleles of a genetic locus or genetic loci from one genetic background to another. For example, a desired allele at a specified locus can be transmitted to at least one progeny via a sexual cross between two parents of the same species, where at least one of the parents has the desired allele in its genome. Alternatively, for example, transmission of an allele can occur by recombination between two donor genomes, e.g., in a fused protoplast, where at least one of the donor protoplasts has the desired allele in its genome. The desired allele may be a selected allele of a marker, a QTL, a transgene, or the like. Offspring comprising the desired allele can be backcrossed one or more times (e.g., 1, 2, 3, 4, or more times) to a line having a desired genetic background, selecting for the desired allele, with the result being that the desired allele becomes fixed in the desired genetic background. For example, a marker associated with increased yield under non-water stress conditions may be introgressed from a donor into a recurrent parent that does not comprise the marker and does not exhibit increased yield under non-water stress conditions. The resulting offspring could then be backcrossed one or more times and selected until the progeny possess the genetic marker(s) associated with increased yield under non-water stress conditions in the recurrent parent background.

[0114] A “genetic map” is a description of genetic linkage relationships among loci on one or more chromosomes within a given species, generally depicted in a diagrammatic or tabular form. For each genetic map, distances between loci are measured by the recombination frequencies between them. Recombination between loci can be detected using a variety of markers. A genetic map is a product of the mapping population, types of markers used, and the polymorphic potential of each marker between different populations. The order and genetic distances between loci can differ from one genetic map to another.

[0115] As used herein, the term “genotype” refers to the genetic constitution of an individual (or group of individuals) at one or more genetic loci, as contrasted with the observable and/or detectable and/or manifested trait (the phenotype). Genotype is defined by the allele(s) of one or more known loci that the individual has inherited from its parents. The term genotype can be used to refer to an individual's genetic constitution at a single locus, at multiple loci, or more generally, the term genotype can be used to refer to an individual's genetic make-up for all the genes in its genome. Genotypes can be indirectly characterized, e.g., using markers and/or directly characterized by nucleic acid sequencing.

[0116] As used herein, the term “germplasm” refers to genetic material of or from an individual (e.g., a plant), a group of individuals (e.g., a plant line, variety or family), or a clone derived from a line, variety, species, or culture. The germplasm can be part of an organism or cell, or can be separate from the organism or cell. In general, germplasm provides genetic material with a specific genetic makeup that provides a foundation for some or all of the hereditary qualities of an organism or cell culture. As used herein, germplasm includes cells, seed or tissues from which new plants may be grown, as well as plant parts that can be cultured into a whole plant (e.g., leaves, stems, buds, roots, pollen, cells, etc.).

[0117] As used herein, the terms “cultivar” and “variety” refer to a group of similar plants that by structural or genetic features and/or performance can be distinguished from other varieties within the same species.

[0118] As used herein, the terms “exotic,” “exotic line” and “exotic germplasm” refer to any plant, line or germplasm that is not elite. In general, exotic plants/germplasms are not derived from any known elite plant or germplasm, but rather are selected to introduce one or more desired genetic elements into a breeding program (e.g., to introduce novel alleles into a breeding program).

[0119] As used herein, the term “hybrid” in the context of plant breeding refers to a plant that is the offspring of genetically dissimilar parents produced by crossing plants of different lines or breeds or species, including but not limited to the cross between two inbred lines.

[0120] As used herein, the term “inbred” refers to a substantially homozygous plant or variety. The term may refer to a plant or plant variety that is substantially homozygous throughout the entire genome or that is substantially homozygous with respect to a portion of the genome that is of particular interest.

[0121] In some embodiments, a “portion” may encode a targeted region for producing a desired phenotype (e.g., reduced pungency and/or reduced bitterness as compared to a plant not having the edit and grown under the same environmental conditions). Thus, with respect to nucleic acids, the term “fragment” or “portion” refers to a nucleic acid that is reduced in length relative (e.g., reduced by 1, 2, 3, 4, 5, 6, 7, 8, 9, 10, 11, 12, 13, 14, 15, 16, 17, 18, 19, 20, 20, 40, 50, 60, 70, 80, 90, 100, 110, 120, 130, 140, 150, 160, 170, 180, 190, 200, 210, 220, 230, 240, 250, 260, 270, 280, 290, 300, 310, 320, 330, 340, 350, 400, 450, 500, 550, 600, 650, 660, 670, 680, 690 or 700 or more nucleotides or any range or value therein) to a reference nucleic acid and that comprises, consists essentially of and/or consists of a nucleotide sequence of contiguous nucleotides identical or almost identical (e.g., 70%, 71%, 72%, 73%, 74%, 75%, 76%, 77%, 78%, 79%, 80%, 81%, 82%, 83%, 84%, 85%, 86%, 87%, 88%, 89%, 90%, 91%, 92%, 93%, 94%, 95%, 96%, 97%, 98%, 99% identical) to a corresponding portion of the reference nucleic acid. Such a nucleic acid fragment may be, where appropriate, included in a larger polynucleotide of which it is a constituent. As an example, a repeat sequence of guide nucleic acid of this invention may comprise a “portion” of a wild type CRISPR-Cas repeat sequence (e.g., a wild Type CRISR-Cas repeat; e.g., a repeat from the CRISPR Cas system of, for example, a Cas9, Cas12a (Cpf1), Cas12b, Cas12c (C2c3), Cas12d (CasY), Cas12e (CasX), Cas12g, Cas12h, Cas12i, C2c4, C2c5, C2c8, C2c9, C2c10, Cas14a, Cas14b, and/or a Cas14c, and the like). In some embodiments, a nucleic acid fragment may comprise, consist essentially of or consist of about 5, 6, 7, 8, 9, 10, 11, 12, 13, 14, 15, 20, 25, 30, 35, 40, 45, 50, 55, 60, 65, 70, 75, 80, 85, 90, 95, 100, 125, 150, 175, 200, 225, 250, 300, 350, 400, 450, 500, 550, 600, or 650, 700, 800, 900, 1000, 1100, 1200, 1300, 1400, 1500, 1600, 1700, 1800, 1900, 2000, 2100, 2200, 2250, 2300, 2350, 2400, 2450, 2500, 2550, 2600, 2650, 2700, 2750, 2800, 2900, 3000, 3500, 4000, 4500, 5000, 5500 or more consecutive nucleotides or any range or value therein of a nucleic acid encoding a myrosinase nucleic acid, an AOP2 nucleic acid, and/or a CYP79F1 nucleic acid.

[0122] In some embodiments, a nucleic acid fragment of a myrosinase gene (i.e., glucosinolase, thioglucosidase (e.g., β-thioglucosidase), thioglucoside glucohydrolase; EC 3.2.1.147 (EC 3.2.3.1 transferred to 3.2.1.147)), an AOP2 gene (i.e., a 2-oxo acid-dependent dioxygenase; EC 1.14.11.M8), and/or a CYP79F1 gene (i.e., a cytochrome P450 mono-oxygenase, homomethionine N-monooxygenase; EC 1.14.14.42) may be the result of a deletion of nucleotides from the 3′ end, the 5′ end, and/or from within the gene encoding a myrosinase protein, an AOP2 protein or a CYP79F1 protein. In some embodiments, a deletion of a portion of a gene encoding a myrosinase protein, an AOP2 protein or a CYP79F1 protein may comprise a deletion of a portion of consecutive nucleotides from the 5′ end, the 3′ end, from within, or from the 5′ end through the end of the 3′ end of the myrosinase gene, the AOP2 gene or the CYP79F1 gene. In some embodiments, a deletion of a portion of a gene encoding a myrosinase protein, a gene encoding an AOP2 protein or a gene encoding a CYP79F1 protein may comprise a deletion of a portion of at least 2 consecutive nucleotides from the 5′ end, the 3′ end, from within, or from the 5′ end through the end of the 3′ end of the myrosinase gene, the AOP2 gene or the CYP79F1 gene. In some embodiments, a deletion of a portion of a gene may be a portion of consecutive nucleotides that deleted from the 5′ end and extends into the 3′ end of the gene, optionally extending to the end of the gene or coding sequence. In some embodiments, a deletion of a portion of a gene encoding a myrosinase protein, an AOP2 protein or a CYP79F1 protein may comprise a deletion of a portion of at least 3 consecutive nucleotides to up to the entire gene. In some embodiments, a deletion of a portion of a gene encoding a myrosinase protein, a gene encoding an AOP2 protein or a gene encoding a CYP79F1 protein may result in the production of no protein or may result in the production of a protein (e.g., a peptide) that is non-functional.

[0123] In some embodiments, a deletion of a portion of a myrosinase gene may comprise deletion of a portion of consecutive nucleotides as described herein from a nucleotide sequence having at least 80% sequence identity to the nucleotide sequence of any one of SEQ ID NOs:66-92, or 680-721. In some embodiments, a deletion of a portion of an AOP2 gene may comprise deletion of a portion of consecutive nucleotides as described herein from a nucleotide sequence having at least 80% sequence identity to the nucleotide sequence of any one of SEQ ID NOs:118-127 or 722-736. In some embodiments, a deletion of a portion of a CYP79F1 gene may comprise deletion of a portion of consecutive nucleotides as described herein from a nucleotide sequence having at least 80% sequence identity to the nucleotide sequence of SEQ ID NOs:113, 114, or 737-742. In some embodiments, a deletion of a portion of nucleotides from a nucleotide sequence having at least 80% sequence identity to any one of the nucleotide sequences of SEQ ID NOs:66-92 or 668-721, SEQ ID NOs:118-127 or 722-736, or SEQ ID NOs:113, 114, or 737-742 may result in the truncation of the encoded protein and the production of no protein or the production of a protein that is non-functional.

[0124] In some embodiments, such a deletion in myrosinase gene (i.e., glucosinolase, thioglucosidase (e.g., β-thioglucosidase), thioglucoside glucohydrolase; EC 3.2.1.147 (EC 3.2.3.1 transferred to 3.2.1.147)), an AOP2 gene (i.e., a 2-oxo acid-dependent dioxygenase; EC 1.14.11.M8), and/or a CYP79F1 gene (i.e., a cytochrome P450 mono-oxygenase, homomethionine N-monooxygenase; EC 1.14.14.42) gene may result in a null allele, which when comprised in a plant can result in a phenotype of reduced pungency and/or reduced bitterness as compared to a plant not comprising the edit and grown under the same environmental conditions. In some embodiments, such a deletion may be a dominant-negative allele, semi-dominant allele, weak loss of function allele, a null allele, or a hypomorphic mutation, which when comprised in a plant can result in in a phenotype of reduced pungency and/or reduced bitterness.

[0125] Similarly, a portion of a polypeptide may be 4 amino acids, 5 amino acids, 6 amino acids, 7 amino acids, and so on, going up to the full length polypeptide. The length of the portion to be used or deleted will depend on the particular application. A portion of a polypeptide useful as an epitope may be as short as 4 amino acids. A portion of a polypeptide that performs the function of the full-length polypeptide would generally be longer than 4 amino acids. In some embodiments, a fragment of a polypeptide or polynucleotide comprises at least 10%, 20%, 30%, 40%, 50%, 60%, 70%, 80%, 90%, 95%, 96%, 97%, 98%, or 99% of the entire length of the reference polypeptide or polynucleotide.

[0126] Further, with respect to polypeptides, the term “fragment” or “portion” may refer to a polypeptide that is reduced in length relative to a reference polypeptide and that comprises, consists essentially of and/or consists of an amino acid sequence of contiguous amino acids identical or almost identical (e.g., 90%, 91%, 92%, 93%, 94%, 95%, 96%, 97%, 98%, 99% identical) to a corresponding portion of the reference polypeptide. Such a polypeptide fragment may be, where appropriate, included in a larger polypeptide of which it is a constituent. In some embodiments, the polypeptide fragment comprises, consists essentially of or consists of at least about 2, 3, 4, 5, 6, 7, 8, 9, 10, 11, 12, 13, 14, 15, 20, 25, 30, 35, 40, 45, 50, 55, 60, 65, 70, 75, 80, 85, 90, 95, 100, 125, 150, 175, 200, 225, 250, 300, 350, 400 or more consecutive amino acids of a reference polypeptide. In some embodiments, a myrosinase polypeptide, an AOP2 polypeptide and/or a CYP79F1 polypeptide may be reduced in length by about 5, 6, 7, 8, 9, 10, 11, 12, 13, 14, 15, 20, 25, 30, 35, 40, 45, 50, 55, 60, 65, 70, 75, 80, 85, 90, 95, 100, 110, 115, 120, 125, 130, 135, 140, 145, 150, 155, 160, 165, 170, 180, 190, 200, 210, 220, 230, 240, 250, 260, 270, 280, 290, 300, 310, 320, 330, 340, 350, 360, 370, 380, 390, 400, 410, 420, 430, 440, 450, 460, 470, 480, 500, 510, 520, 530, or 540 or more consecutive amino acid residues (or any range or value therein). In some embodiments, a myrosinase polypeptide, an AOP2 polypeptide and/or a CYP79F1 polypeptide may be reduced in length may be so reduced in length that it cannot be detected (e.g., is absent) or that the portion remaining is non-functional. In some embodiments, such a polypeptide having a reduced length as described herein may be a dominant-negative allele, semi-dominant allele, weak loss of function allele, a null allele, or a hypomorphic mutation, which when comprised in a plant, results in a plant that exhibits reduced pungency and/or reduced bitterness compared to a plant not comprising the mutation and grown under the same environmental conditions.

[0127] In some embodiments, a polypeptide having at least 80% sequence identity to any one of the amino acid sequences of SEQ ID NOs:93-105, 115, 128-132, 617-679 or 743-786 may be reduced in length by about 5 to about 540 or more consecutive amino acid residues (or any range or value therein) up to the full length of the polypeptide. In some embodiments, the polypeptide may be so reduced in length that it cannot be detected (e.g., is absent) or that the portion remaining is non-functional.

[0128] In some embodiments, a “portion” may be related to the number of amino acids that are deleted from a polypeptide. Thus, for example, a deleted “portion” of, for example, a myrosinase polypeptide (i.e., glucosinolase, thioglucosidase (e.g., β-thioglucosidase), thioglucoside glucohydrolase; EC 3.2.1.147 (EC 3.2.3.1 transferred to 3.2.1.147)), an AOP2 polypeptide (i.e., a 2-oxo acid-dependent dioxygenase; EC 1.14.11.M8) and/or a CYP79F1 polypeptide (i.e., a cytochrome P450 mono-oxygenase, homomethionine N-monooxygenase; EC 1.14.14.42) may comprise at least one amino acid residue (e.g., at least 1, or at least 2, 3, 4, 5, 6, 7, 8, 9, 10, 11, 12, 13, 14, 15, 16, 17, 18, 19, 20, 21, 22, 23, 24, 25, 26, 27, 28, 29, 30, 31, 32, 33, 34, 35, 36, 37, 38, 39, 40, 41, 42, 43, 44, 45, 46, 47, 48, 49, 50, 51, 52, 53, 54, 55, 56, 57, 58, 59, 60, 61, 62, 63, 64, 65, 66, 67, 68, 69, 70, 71, 72, 73, 74, 75, 76, 77, 78, 79, 80, 81, 82, 83, 84, 85, 86, 87, 88, 89, 90, 91, 92, 93, 94, 95, 96, 97, 98, 99, 100, 110, 115, 120, 125, 130, 135, 140, 145, 150, 155, 160, 165, 170, 180, 190, 200, 210, 220, 230, 240, 250, 260, 270, 280, 290, 300, 310, 320, 330, 340, 350, 360, 370, 380, 390, 400, 410, 420, 430, 440, 450, 460, 470, 480, 500, 510, 520, 530, or 540 or more consecutive amino acid residues (or any range or value therein). In some embodiments, a portion of amino acids may be deleted from a polypeptide having at least 80% sequence identity to any one of SEQ ID NOs:93-105, 115, 128-132, 617-679 or 743-786. In some embodiments, a deletion of a portion of a myrosinase polypeptide, an AOP2 polypeptide and/or a CYP79F1 polypeptide may comprise a deletion of a portion of consecutive amino acid residues from the N- or C-terminus of a polypeptide, within a polypeptide, or from the N-terminus through to the end of the C terminus of a polypeptide having at least 80% sequence identity to any one of SEQ ID NOs:93-105, 115, 128-132, 617-679 or 743-786. In some embodiments, such a deletion may be a dominant-negative allele, semi-dominant allele, weak loss of function allele, a null allele, or a hypomorphic mutation, which when comprised in a plant, the plant exhibits reduced pungency and/or reduced bitterness compared to a plant not comprising the mutation and grown under the same environmental conditions. In some embodiments, such a deletion is a null allele, which when comprised in a plant, the plant exhibits reduced pungency and/or reduced bitterness compared to a plant not comprising the mutation and grown under the same environmental conditions.

[0129] As used herein, the term “gene” refers to any segment of DNA associated with a biological function. Thus, genes include, but are not limited to, coding sequences and/or the regulatory sequences required for their expression. Genes can also include non-expressed DNA segments that, for example, form recognition sequences for other proteins. Genes can be obtained from a variety of sources, including cloning from a source of interest or synthesizing from known or predicted sequence information, and may include sequences designed to have desired parameters.

[0130] As used herein, the term “endogenous” or “endogenous gene,” refers to the naturally occurring gene, in the location in which it is naturally found within the host cell genome. An endogenous gene as described herein can include alleles of naturally occurring genes that have been mutated according to any of the methods of the present disclosure, i.e., an endogenous gene may have been modified previously by traditional plant breeding methods and/or next generation plant breeding methods.

[0131] As used herein, the term “exogenous” refers to a substance coming from some source other than its native source or location. For example, the terms “exogenous protein,” or “exogenous gene” or “exogenous nucleic acid” refer to a protein or nucleic acid from a non-native source, and that has been artificially supplied to a biological system.

[0132] A “heterologous” or a “recombinant” nucleotide sequence is a nucleotide sequence not naturally associated with a host cell into which it is introduced, including non-naturally occurring multiple copies of a naturally occurring nucleotide sequence. In some embodiments, the term “exogenous” is used interchangeably with the term “heterologous.” In some embodiments, the term “heterologous nucleic acid” refers to a nucleic acid sequence that is not naturally found in the particular organism. For example, the term “heterologous promoter” may refer to a promoter that has been taken from one source organism and utilized in another organism, in which the promoter is not naturally found. However, the term “heterologous promoter” may also refer to a promoter that is from within the same source organism, but has been moved to a novel location, in which said promoter is not normally located.

[0133] Heterologous gene sequences can be introduced into a target cell by using an “expression vector,” which can be a eukaryotic expression vector, for example a plant expression vector. Methods used to construct vectors are well known to a person skilled in the art and described in various publications. In particular, techniques for constructing suitable vectors, including a description of the functional components such as promoters, enhancers, termination and polyadenylation signals, selection markers, origins of replication, and splicing signals, are reviewed in the prior art.

[0134] As used herein, the term “homologous” or “homolog” or “ortholog” is known in the art and refers to related sequences that share a common ancestor or family member and are determined based on the degree of sequence identity. Homologous sequences are orthologous when they are inferred to be descended from the same ancestral sequence separated by a speciation event: when a species diverges into two separate species, the copies of a single gene in the two resulting species are said to be orthologous. “Orthologs”, or “orthologous genes,” are genes in different species that originated by vertical descent from a single gene of the last common ancestor. The terms “homology,” “homologous,” “substantially similar” and “corresponding substantially” are used interchangeably herein. They refer to nucleic acid fragments wherein changes in one or more nucleotide bases do not affect the ability of the nucleic acid fragment to mediate gene expression or produce a certain phenotype. These terms also refer to modifications of the nucleic acid fragments of the instant disclosure such as deletion or insertion of one or more nucleotides that do not substantially alter the functional properties of the resulting nucleic acid fragment relative to the initial, unmodified fragment. It is therefore understood, as those skilled in the art will appreciate, that the disclosure encompasses more than the specific exemplary sequences. These terms describe the relationship between a gene found in one species, subspecies, variety, cultivar or strain and the corresponding or equivalent gene in another species, subspecies, variety, cultivar or strain. For purposes of this disclosure, homologous sequences are compared. “Homologous sequences” or “homologs” or “orthologs” are thought, believed, or known to be functionally related. A functional relationship may be indicated in any one of a number of ways, including, but not limited to: (a) degree of sequence identity and/or (b) the same or similar biological function. Preferably, both (a) and (b) are indicated. Homology can be determined using software programs readily available in the art, such as those discussed in Current Protocols in Molecular Biology (F.M. Ausubel et al., eds., 1987) Supplement 30, section 7.718, Table 7.71. Some alignment programs are MacVector (Oxford Molecular Ltd, Oxford, U.K.), ALIGN Plus (Scientific and Educational Software, Pennsylvania) and AlignX (Vector NTI, Invitrogen, Carlsbad, Calif.). Another alignment program is Sequencher (Gene Codes, Ann Arbor, Mich.), using default parameters, and MUSCLE (Multiple Sequence Comparison by Log-Expection; a computer software licensed as public domain).

[0135] As used herein, the term “polynucleotide modification” refers to, e.g., base substitution, deletion, and/or insertion, as is well understood in the art. As used herein, the term “protein modification” refers to, e.g., amino acid modification, amino acid substitution, deletion, and/or insertion, as is well understood in the art.

[0136] As used herein, the term “codon optimization” refers to the codon usage of a DNA or RNA that is adapted to that of a cell or organism of interest to improve the transcription rate of said recombinant nucleic acid in the cell or organism of interest. The skilled person is well aware of the fact that a target nucleic acid can be modified at one position due to the codon degeneracy, whereas this modification will still lead to the same amino acid sequence at that position after translation, which is achieved by codon optimization to take into consideration the species-specific codon usage of a target cell or organism. In some embodiments, the polynucleotides, nucleic acid constructs, expression cassettes, and/or vectors of the editing systems of the invention (e.g., comprising/encoding a sequence-specific DNA binding domain (e.g., a sequence-specific DNA binding domain from a polynucleotide-guided endonuclease, a zinc finger nuclease, a transcription activator-like effector nuclease (TALEN), an Argonaute protein, and/or a CRISPR-Cas endonuclease (e.g., CRISPR-Cas effector protein) (e.g., a Type I CRISPR-Cas effector protein, a Type II CRISPR-Cas effector protein, a Type III CRISPR-Cas effector protein, a Type IV CRISPR-Cas effector protein, a Type V CRISPR-Cas effector protein or a Type VI CRISPR-Cas effector protein)), a nuclease (e.g., an endonuclease (e.g., Fok1), a polynucleotide-guided endonuclease, a CRISPR-Cas endonuclease (e.g., CRISPR-Cas effector protein), a zinc finger nuclease, and/or a transcription activator-like effector nuclease (TALEN)), deaminase proteins/domains (e.g., adenine deaminase, cytosine deaminase), a polynucleotide encoding a reverse transcriptase protein or domain, a polynucleotide encoding a 5′-3′ exonuclease polypeptide, and/or affinity polypeptides, peptide tags, etc.) may be codon optimized for expression in a plant. In some embodiments, codon optimized nucleic acids, polynucleotides, expression cassettes, and/or vectors of the invention have about 70% to about 99.9% (e.g., 70%, 71%, 72%, 73%, 74%, 75%, 76%, 77%, 78%, 79%, 80%, 81%, 82%, 83%, 84%, 85%, 86%, 87%, 88%, 89%, 90%, 91%, 92%, 93%, 94%, 95%, 96%, 97%, 98%, 99%, 99.5%. 99.9% or 100%) identity or more to the reference nucleic acids, polynucleotides, expression cassettes, and/or vectors that have not been codon optimized.

[0137] As used herein, the term “naturally occurring” as applied to a nucleic acid, a polypeptide, a cell, or an organism, refers to a nucleic acid, polypeptide, cell, or organism that is found in nature. The term “naturally occurring” may refer to a gene, polynucleotide, or polypeptide derived from a naturally occurring source. Thus, for the purposes of this disclosure, a “non-natural” or a “non-naturally occurring” sequence is a sequence that has been synthesized, mutated, engineered, edited, or otherwise modified to have a different sequence from known natural sequences. In some embodiments, the modification may be at the protein level (e.g., amino acid modifications, e.g., substitutions, deletions, or additions/insertions). In other embodiments, the modification may be at the DNA level (e.g., nucleotide or base modifications, e.g., substitutions, deletions, or insertions). “Non-natural” refers to a nucleic acid, a polypeptide, a cell, or an organism, that is not found in nature (e.g., a non-natural mutation) or not found in nature in the specific combination described.

[0138] The term “mutation” refers to point mutations (e.g., missense, or nonsense, or insertions or deletions of single base pairs that result in frame shifts), insertions, deletions, and/or truncations. When the mutation is a substitution of a residue within an amino acid sequence with another residue, or a deletion or insertion of one or more residues within a sequence, the mutations are typically described by identifying the original residue followed by the position of the residue within the sequence and by the identity of the newly substituted residue. A truncation can include a truncation at the C-terminal end of a polypeptide or at the N-terminal end of a polypeptide or may be a truncation that extends from the N-terminus through to the end of the C-terminus. A truncation of a polypeptide can be the result of a deletion of the corresponding 5′ end or 3′ end of the gene encoding the polypeptide or may be a deletion of most or all of the 5′ end of the gene through the 3′ end of the gene encoding the polypeptide. In some embodiments, a truncation of a myrosinase gene, an AOP2 gene and/or a CYP79F1 gene may be a mutation such as a base deletion, addition, or substitution that results in an in-frame mutation or an out-of-frame mutation. In some embodiments, a truncation of a myrosinase gene, an AOP2 gene and/or a CYP79F1 gene may be a mutation that results in premature stop codon, thereby producing a truncation of the encoded polypeptide.

[0139] As used herein, the phrases “recombinant construct”, “expression construct”, “chimeric construct”, “heterologous construct”, and “recombinant DNA construct” are used interchangeably herein. A recombinant construct comprises an artificial combination of nucleic acid fragments, e.g., regulatory and coding sequences that are not found together in nature. For example, a chimeric construct may comprise regulatory sequences and coding sequences that are derived from different sources, or regulatory sequences and coding sequences derived from the same source, but arranged in a manner different than that found in nature. Such construct may be used by itself or may be used in conjunction with a vector. If a vector is used then the choice of vector is dependent upon the method that will be used to transform host cells as is well known to those skilled in the art. For example, a plasmid vector can be used. The skilled artisan is well aware of the genetic elements that must be present on the vector in order to successfully transform, select and propagate host cells comprising any of the isolated nucleic acid fragments of the disclosure. The skilled artisan will also recognize that different independent transformation events will result in different levels and patterns of expression (Jones et al., (1985) EMBO J. 4:2411-2418; De Almeida et al., (1989) Mol. Gen. Genetics 218:78-86), and thus that multiple events must be screened in order to obtain lines displaying the desired expression level and pattern. Such screening may be accomplished by Southern analysis of DNA, Northern analysis of mRNA expression, immunoblotting analysis of protein expression, or phenotypic analysis, among others. Vectors can be plasmids, viruses, bacteriophages, pro-viruses, phagemids, transposons, artificial chromosomes, and the like, that replicate autonomously or can integrate into a chromosome of a host cell. A vector can also be a naked RNA polynucleotide, a naked DNA polynucleotide, a polynucleotide composed of both DNA and RNA within the same strand, a poly-lysine-conjugated DNA or RNA, a peptide-conjugated DNA or RNA, a liposome-conjugated DNA, or the like, that is not autonomously replicating. As used herein, the term “expression” refers to the production of a functional end-product e.g., an mRNA or a protein (precursor or mature).

[0140] In any of the embodiments described herein, a polynucleotide or nucleic acid construct of the invention may be operatively associated with a variety of promoters and/or other regulatory elements for expression in a plant and/or a cell of a plant. Thus, in some embodiments, a polynucleotide or nucleic acid construct of this invention may further comprise one or more promoters, introns, enhancers, and/or terminators operably linked to one or more nucleotide sequences. In some embodiments, a promoter may be operably associated with an intron (e.g., Ubil promoter and intron). In some embodiments, a promoter associated with an intron maybe referred to as a “promoter region” (e.g., Ubil promoter and intron).

[0141] By “operably linked” or “operably associated” as used herein in reference to polynucleotides, it is meant that the indicated elements are functionally related to each other, and are also generally physically related. Thus, the term “operably linked” or “operably associated” as used herein, refers to nucleotide sequences on a single nucleic acid molecule that are functionally associated. Thus, a first nucleotide sequence that is operably linked to a second nucleotide sequence means a situation when the first nucleotide sequence is placed in a functional relationship with the second nucleotide sequence. For instance, a promoter is operably associated with a nucleotide sequence if the promoter effects the transcription or expression of said nucleotide sequence. Those skilled in the art will appreciate that the control sequences (e.g., promoter) need not be contiguous with the nucleotide sequence to which it is operably associated, as long as the control sequences function to direct the expression thereof. Thus, for example, intervening untranslated, yet transcribed, nucleic acid sequences can be present between a promoter and the nucleotide sequence, and the promoter can still be considered “operably linked” to the nucleotide sequence.

[0142] As used herein, the term “linked,” in reference to polypeptides, refers to the attachment of one polypeptide to another. A polypeptide may be linked to another polypeptide (at the N-terminus or the C-terminus) directly (e.g., via a peptide bond) or through a linker.

[0143] The term “linker” is art-recognized and refers to a chemical group, or a molecule linking two molecules or moieties, e.g., two domains of a fusion protein, such as, for example, a DNA binding polypeptide or domain and peptide tag and/or a reverse transcriptase and an affinity polypeptide that binds to the peptide tag; or a DNA endonuclease polypeptide or domain and peptide tag and/or a reverse transcriptase and an affinity polypeptide that binds to the peptide tag. A linker may be comprised of a single linking molecule or may comprise more than one linking molecule. In some embodiments, the linker can be an organic molecule, group, polymer, or chemical moiety such as a bivalent organic moiety. In some embodiments, the linker may be an amino acid or it may be a peptide. In some embodiments, the linker is a peptide.

[0144] In some embodiments, a peptide linker useful with this invention may be about 2 to about 100 or more amino acids in length, for example, about 2, 3, 4, 5, 6, 7, 8, 9, 10, 11, 12, 13, 14, 15, 16, 17, 18, 19, 20, 21, 22, 23, 24, 25, 26, 27, 28, 29, 30, 31, 32, 33, 34, 35, 36, 37, 38, 39, 40, 41, 42, 43, 44, 45, 46, 47, 48, 49, 50, 51, 52, 53, 54, 55, 56, 57, 58, 59, 60, 61, 62, 63, 64, 65, 66, 67, 68, 69, 70, 71, 72, 73, 74, 75, 76, 77, 78, 79, 80, 81, 82, 83, 84, 85, 86, 87, 88, 89, 90, 91, 92, 93, 94, 95, 96, 97, 98, 99, 100 or more amino acids in length (e.g., about 2 to about 40, about 2 to about 50, about 2 to about 60, about 4 to about 40, about 4 to about 50, about 4 to about 60, about 5 to about 40, about 5 to about 50, about 5 to about 60, about 9 to about 40, about 9 to about 50, about 9 to about 60, about 10 to about 40, about 10 to about 50, about 10 to about 60, or about 2, 3, 4, 5, 6, 7, 8, 9, 10, 11, 12, 13, 14, 15, 16, 17, 18, 19, 20, 21, 22, 23, 24, 25 amino acids to about 26, 27, 28, 29, 30, 31, 32, 33, 34, 35, 36, 37, 38, 39, 40, 41, 42, 43, 44, 45, 46, 47, 48, 49, 50, 51, 52, 53, 54, 55, 56, 57, 58, 59, 60, 61, 62, 63, 64, 65, 66, 67, 68, 69, 70, 71, 72, 73, 74, 75, 76, 77, 78, 79, 80, 81, 82, 83, 84, 85, 86, 87, 88, 89, 90, 91, 92, 93, 94, 95, 96, 97, 98, 99, 100 or more amino acids in length (e.g., about 105, 110, 115, 120, 130, 140 150 or more amino acids in length). In some embodiments, a peptide linker may be a GS linker.

[0145] As used herein, the term “linked,” or “fused” in reference to polynucleotides, refers to the attachment of one polynucleotide to another. In some embodiments, two or more polynucleotide molecules may be linked by a linker that can be an organic molecule, group, polymer, or chemical moiety such as a bivalent organic moiety. A polynucleotide may be linked or fused to another polynucleotide (at the 5′ end or the 3′ end) via a covalent or non-covenant linkage or binding, including e.g., Watson-Crick base-pairing, or through one or more linking nucleotides. In some embodiments, a polynucleotide motif of a certain structure may be inserted within another polynucleotide sequence (e.g. extension of the hairpin structure in the guide RNA). In some embodiments, the linking nucleotides may be naturally occurring nucleotides. In some embodiments, the linking nucleotides may be non-naturally occurring nucleotides.

[0146] A “promoter” is a nucleotide sequence that controls or regulates the transcription of a nucleotide sequence (e.g., a coding sequence) that is operably associated with the promoter. The coding sequence controlled or regulated by a promoter may encode a polypeptide and/or a functional RNA. Typically, a “promoter” refers to a nucleotide sequence that contains a binding site for RNA polymerase II and directs the initiation of transcription. In general, promoters are found 5′, or upstream, relative to the start of the coding region of the corresponding coding sequence. A promoter may comprise other elements that act as regulators of gene expression; e.g., a promoter region. These include a TATA box consensus sequence, and often a CAAT box consensus sequence (Breathnach and Chambon, (1981) Annu. Rev. Biochem. 50:349). In plants, the CAAT box may be substituted by the AGGA box (Messing et al., (1983) in Genetic Engineering of Plants, T. Kosuge, C. Meredith and A. Hollaender (eds.), Plenum Press, pp. 211-227).

[0147] Promoters useful with this invention can include, for example, constitutive, inducible, temporally regulated, developmentally regulated, chemically regulated, tissue-preferred and/or tissue-specific promoters for use in the preparation of recombinant nucleic acid molecules, e.g., “synthetic nucleic acid constructs” or “protein-RNA complex.” These various types of promoters are known in the art.

[0148] The choice of promoter may vary depending on the temporal and spatial requirements for expression, and also may vary based on the host cell to be transformed. Promoters for many different organisms are well known in the art. Based on the extensive knowledge present in the art, the appropriate promoter can be selected for the particular host organism of interest. Thus, for example, much is known about promoters upstream of highly constitutively expressed genes in model organisms and such knowledge can be readily accessed and implemented in other systems as appropriate.

[0149] In some embodiments, a promoter functional in a plant may be used with the constructs of this invention. Non-limiting examples of a promoter useful for driving expression in a plant include the promoter of the RubisCo small subunit gene 1 (PrbcS1), the promoter of the actin gene (Pactin), the promoter of the nitrate reductase gene (Pnr) and the promoter of duplicated carbonic anhydrase gene 1 (Pdca1) (See, Walker et al. Plant Cell Rep. 23:727-735 (2005); Li et al. Gene 403:132-142 (2007); Li et al. Mol Biol. Rep. 37:1143-1154 (2010)). PrbcS1 and Pactin are constitutive promoters and Pnr and Pdca1 are inducible promoters. Pnr is induced by nitrate and repressed by ammonium (Li et al. Gene 403:132-142 (2007)) and Pdca1 is induced by salt (Li et al. Mol Biol. Rep. 37:1143-1154 (2010)). In some embodiments, a promoter useful with this invention is RNA polymerase II (Pol II) promoter. In some embodiments, a U6 promoter or a 7SL promoter from Zea mays may be useful with constructs of this invention. In some embodiments, the U6c promoter and/or 7SL promoter from Zea mays may be useful for driving expression of a guide nucleic acid. In some embodiments, a U6c promoter, U6i promoter and/or 7SL promoter from Glycine max may be useful with constructs of this invention. In some embodiments, the U6c promoter, U6i promoter and/or 7SL promoter from Glycine max may be useful for driving expression of a guide nucleic acid.

[0150] Examples of constitutive promoters useful for plants include, but are not limited to, cestrum virus promoter (cmp) (U.S. Pat. No. 7,166,770), the rice actin 1 promoter (Wang et al. (1992) Mol. Cell. Biol. 12:3399-3406; as well as U.S. Pat. No. 5,641,876), CaMV 35S promoter (Odell et al. (1985) Nature 313:810-812), CaMV 19S promoter (Lawton et al. (1987) Plant Mol. Biol. 9:315-324), nos promoter (Ebert et al. (1987) Proc. Natl. Acad. Sci USA 84:5745-5749), Adh promoter (Walker et al. (1987) Proc. Natl. Acad. Sci. USA 84:6624-6629), sucrose synthase promoter (Yang & Russell (1990) Proc. Natl. Acad. Sci. USA 87:4144-4148), and the ubiquitin promoter. The constitutive promoter derived from ubiquitin accumulates in many cell types. Ubiquitin promoters have been cloned from several plant species for use in transgenic plants, for example, sunflower (Binet et al., 1991. Plant Science 79: 87-94), maize (Christensen et al., 1989. Plant Molec. Biol. 12: 619-632), and arabidopsis (Norris et al. 1993. Plant Molec. Biol. 21:895-906). The maize ubiquitin promoter (UbiP) has been developed in transgenic monocot systems and its sequence and vectors constructed for monocot transformation are disclosed in the patent publication EP 0 342 926. The ubiquitin promoter is suitable for the expression of the nucleotide sequences of the invention in transgenic plants, especially monocotyledons. Further, the promoter expression cassettes described by McElroy et al. (Mol. Gen. Genet. 231: 150-160 (1991)) can be easily modified for the expression of the nucleotide sequences of the invention and are particularly suitable for use in monocotyledonous hosts.

[0151] In some embodiments, tissue specific/tissue preferred promoters can be used for expression of a heterologous polynucleotide in a plant cell. Tissue specific or preferred expression patterns include, but are not limited to, green tissue specific or preferred, root specific or preferred, stem specific or preferred, flower specific or preferred or pollen specific or preferred. Promoters suitable for expression in green tissue include many that regulate genes involved in photosynthesis and many of these have been cloned from both monocotyledons and dicotyledons. In one embodiment, a promoter useful with the invention is the maize PEPC promoter from the phosphoenol carboxylase gene (Hudspeth & Grula, Plant Molec. Biol. 12:579-589 (1989)). Non-limiting examples of tissue-specific promoters include those associated with genes encoding the seed storage proteins (such as β-conglycinin, cruciferin, napin and phaseolin), zein or oil body proteins (such as oleosin), or proteins involved in fatty acid biosynthesis (including acyl carrier protein, stearoyl-ACP desaturase and fatty acid desaturases (fad 2-1)), and other nucleic acids expressed during embryo development (such as Bce4, see, e.g., Kridl et al. (1991) Seed Sci. Res. 1:209-219; as well as EP Patent No. 255378). Tissue-specific or tissue-preferential promoters useful for the expression of the nucleotide sequences of the invention in plants, particularly maize, include but are not limited to those that direct expression in root, pith, leaf or pollen. Such promoters are disclosed, for example, in WO 93/07278, herein incorporated by reference in its entirety. Other non-limiting examples of tissue specific or tissue preferred promoters useful with the invention the cotton rubisco promoter disclosed in U.S. Pat. No. 6,040,504; the rice sucrose synthase promoter disclosed in U.S. Pat. No. 5,604,121; the root specific promoter described by de Framond (FEBS 290:103-106 (1991); EP 0 452 269 to Ciba-Geigy); the stem specific promoter described in U.S. Pat. No. 5,625,136 (to Ciba-Geigy) and which drives expression of the maize trpA gene; the cestrum yellow leaf curling virus promoter disclosed in WO 01/73087; and pollen specific or preferred promoters including, but not limited to, ProOsLPS10 and ProOsLPS11 from rice (Nguyen et al. Plant Biotechnol. Reports 9(5):297-306 (2015)), ZmSTK2_USP from maize (Wang et al. Genome 60(6):485-495 (2017)), LAT52 and LAT59 from tomato (Twell et al. Development 109(3):705-713 (1990)), Zm13 (U.S. Pat. No. 10,421,972), PLA₂-δ promoter from arabidopsis (U.S. Pat. No. 7,141,424), and/or the ZmC5 promoter from maize (International PCT Publication No. WO1999/042587.

[0152] Additional examples of plant tissue-specific/tissue preferred promoters include, but are not limited to, the root hair—specific cis-elements (RHEs) (Kim et al. The Plant Cell 18.2958-2970 (2006)), the root-specific promoters RCc3 (Jeong et al. Plant Physiol. 153:185-197 (2010)) and RB7 (U.S. Pat. No. 5,459,252), the lectin promoter (Lindstrom et al. (1990) Der. Genet. 11:160-167; and Vodkin (1983) Prog. Clin. Biol. Res. 138:87-98), corn alcohol dehydrogenase 1 promoter (Dennis et al. (1984) Nucleic Acids Res. 12:3983-4000), S-adenosyl-L-methionine synthetase (SAMS) (Vander Mijnsbrugge et al. (1996) Plant and Cell Physiology, 37(8):1108-1115), corn light harvesting complex promoter (Bansal et al. (1992) Proc. Natl. Acad. Sci. USA 89:3654-3658), corn heat shock protein promoter (O'Dell et al. (1985) EMBO J. 5:451-458; and Rochester et al. (1986) EMBO J. 5:451-458), pea small subunit RuBP carboxylase promoter (Cashmore, “Nuclear genes encoding the small subunit of ribulose-l,5-bisphosphate carboxylase” pp. 29-39 In: Genetic Engineering of Plants (Hollaender ed., Plenum Press 1983; and Poulsen et al. (1986) Mol. Gen. Genet. 205:193-200), Ti plasmid mannopine synthase promoter (Langridge et al. (1989) Proc. Natl. Acad. Sci. USA 86:3219-3223), Ti plasmid nopaline synthase promoter (Langridge et al. (1989), supra), petunia chalcone isomerase promoter (van Tunen et al. (1988) EMBO J. 7:1257-1263), bean glycine rich protein 1 promoter (Keller et al. (1989) Genes Dev. 3:1639-1646), truncated CaMV 35S promoter (O'Dell et al. (1985) Nature 313:810-812), potato patatin promoter (Wenzler et al. (1989) Plant Mol. Biol. 13:347-354), root cell promoter (Yamamoto et al. (1990) Nucleic Acids Res. 18:7449), maize zein promoter (Kriz et al. (1987) Mol. Gen. Genet. 207:90-98; Langridge et al. (1983) Cell 34:1015-1022; Reina et al. (1990) Nucleic Acids Res. 18:6425; Reina et al. (1990) Nucleic Acids Res. 18:7449; and Wandelt et al. (1989) Nucleic Acids Res. 17:2354), globulin-1 promoter (Belanger et al. (1991) Genetics 129:863-872), α-tubulin cab promoter (Sullivan et al. (1989) Mol. Gen. Genet. 215:431-440), PEPCase promoter (Hudspeth & Grula (1989) Plant Mol. Biol. 12:579-589), R gene complex-associated promoters (Chandler et al. (1989) Plant Cell 1:1175-1183), and chalcone synthase promoters (Franken et al. (1991) EMBO J. 10:2605-2612).

[0153] Useful for seed-specific expression is the pea vicilin promoter (Czako et al. (1992) Mol. Gen. Genet. 235:33-40; as well as the seed-specific promoters disclosed in U.S. Pat. No. 5,625,136. Useful promoters for expression in mature leaves are those that are switched at the onset of senescence, such as the SAG promoter from Arabidopsis (Gan et al. (1995) Science 270:1986-1988).

[0154] In addition, promoters functional in chloroplasts can be used. Non-limiting examples of such promoters include the bacteriophage T3 gene 9 5′ UTR and other promoters disclosed in U.S. Pat. No. 7,579,516. Other promoters useful with the invention include but are not limited to the S-E9 small subunit RuBP carboxylase promoter and the Kunitz trypsin inhibitor gene promoter (Kti3).

[0155] Additional regulatory elements useful with this invention include, but are not limited to, introns, enhancers, termination sequences and/or 5′ and 3′ untranslated regions.

[0156] An intron useful with this invention can be an intron identified in and isolated from a plant and then inserted into an expression cassette to be used in transformation of a plant. As would be understood by those of skill in the art, introns can comprise the sequences required for self-excision and are incorporated into nucleic acid constructs/expression cassettes in frame. An intron can be used either as a spacer to separate multiple protein-coding sequences in one nucleic acid construct, or an intron can be used inside one protein-coding sequence to, for example, stabilize the mRNA. If they are used within a protein-coding sequence, they are inserted “in-frame” with the excision sites included. Introns may also be associated with promoters to improve or modify expression. As an example, a promoter/intron combination useful with this invention includes but is not limited to that of the maize Ubi1 promoter and intron (see, e.g, SEQ ID NO:21 and SEQ ID NO:22).

[0157] Non-limiting examples of introns useful with the present invention include introns from the ADHI gene (e.g., Adh1-S introns 1, 2 and 6), the ubiquitin gene (Ubi1), the RuBisCO small subunit (rbcS) gene, the RuBisCO large subunit (rbcL) gene, the actin gene (e.g., actin-1 intron), the pyruvate dehydrogenase kinase gene (pdk), the nitrate reductase gene (nr), the duplicated carbonic anhydrase gene 1 (Tdca1), the psbA gene, the atpA gene, or any combination thereof.

[0158] In some embodiments, a polynucleotide and/or a nucleic acid construct of the invention can be an “expression cassette” or can be comprised within an expression cassette. As used herein, “expression cassette” means a recombinant nucleic acid molecule comprising, for example, a one or more polynucleotides of the invention (e.g., a polynucleotide encoding a sequence-specific DNA binding domain, a polynucleotide encoding a deaminase protein or domain, a polynucleotide encoding a reverse transcriptase protein or domain, a polynucleotide encoding a 5′-3′ exonuclease polypeptide or domain, a guide nucleic acid and/or reverse transcriptase (RT) template), wherein polynucleotide(s) is/are operably associated with one or more control sequences (e.g., a promoter, terminator and the like). Thus, in some embodiments, one or more expression cassettes may be provided, which are designed to express, for example, a nucleic acid construct of the invention (e.g., a polynucleotide encoding a sequence-specific DNA binding domain, a polynucleotide encoding a nuclease polypeptide/domain, a polynucleotide encoding a deaminase protein/domain, a polynucleotide encoding a reverse transcriptase protein/domain, a polynucleotide encoding a 5′-3′ exonuclease polypeptide/domain, a polynucleotide encoding a peptide tag, and/or a polynucleotide encoding an affinity polypeptide, and the like, or comprising a guide nucleic acid, an extended guide nucleic acid, and/or RT template, and the like). When an expression cassette of the present invention comprises more than one polynucleotide, the polynucleotides may be operably linked to a single promoter that drives expression of all of the polynucleotides or the polynucleotides may be operably linked to one or more separate promoters (e.g., three polynucleotides may be driven by one, two or three promoters in any combination). When two or more separate promoters are used, the promoters may be the same promoter or they may be different promoters. Thus, a polynucleotide encoding a sequence specific DNA binding domain, a polynucleotide encoding a nuclease protein/domain, a polynucleotide encoding a CRISPR-Cas effector protein/domain, a polynucleotide encoding an deaminase protein/domain, a polynucleotide encoding a reverse transcriptase polypeptide/domain (e.g., RNA-dependent DNA polymerase), and/or a polynucleotide encoding a 5′-3′ exonuclease polypeptide/domain, a guide nucleic acid, an extended guide nucleic acid and/or RT template when comprised in a single expression cassette may each be operably linked to a single promoter, or separate promoters in any combination.

[0159] An expression cassette comprising a nucleic acid construct of the invention may be chimeric, meaning that at least one of its components is heterologous with respect to at least one of its other components (e.g., a promoter from the host organism operably linked to a polynucleotide of interest to be expressed in the host organism, wherein the polynucleotide of interest is from a different organism than the host or is not normally found in association with that promoter). An expression cassette may also be one that is naturally occurring but has been obtained in a recombinant form useful for heterologous expression.

[0160] An expression cassette can optionally include a transcriptional and/or translational termination region (i.e., termination region) and/or an enhancer region that is functional in the selected host cell. A variety of transcriptional terminators and enhancers are known in the art and are available for use in expression cassettes. Transcriptional terminators are responsible for the termination of transcription and correct mRNA polyadenylation. A termination region and/or the enhancer region may be native to the transcriptional initiation region, may be native to, for example, a gene encoding a sequence-specific DNA binding protein, a gene encoding a nuclease, a gene encoding a reverse transcriptase, a gene encoding a deaminase, and the like, or may be native to a host cell, or may be native to another source (e.g., foreign or heterologous to, for example, to a promoter, to a gene encoding a sequence-specific DNA binding protein, a gene encoding a nuclease, a gene encoding a reverse transcriptase, a gene encoding a deaminase, and the like, or to the host cell, or any combination thereof).

[0161] An expression cassette of the invention also can include a polynucleotide encoding a selectable marker, which can be used to select a transformed host cell. As used herein, “selectable marker” means a polynucleotide sequence that when expressed imparts a distinct phenotype to the host cell expressing the marker and thus allows such transformed cells to be distinguished from those that do not have the marker. Such a polynucleotide sequence may encode either a selectable or screenable marker, depending on whether the marker confers a trait that can be selected for by chemical means, such as by using a selective agent (e.g., an antibiotic and the like), or on whether the marker is simply a trait that one can identify through observation or testing, such as by screening (e.g., fluorescence). Many examples of suitable selectable markers are known in the art and can be used in the expression cassettes described herein.

[0162] In addition to expression cassettes, the nucleic acid molecules/constructs and polynucleotide sequences described herein can be used in connection with vectors. The term “vector” refers to a composition for transferring, delivering or introducing a nucleic acid (or nucleic acids) into a cell. A vector comprises a nucleic acid construct (e.g. expression cassette(s)) comprising the nucleotide sequence(s) to be transferred, delivered or introduced. Vectors for use in transformation of host organisms are well known in the art. Non-limiting examples of general classes of vectors include viral vectors, plasmid vectors, phage vectors, phagemid vectors, cosmid vectors, fosmid vectors, bacteriophages, artificial chromosomes, minicircles, or Agrobacterium binary vectors in double or single stranded linear or circular form which may or may not be self-transmissible or mobilizable. In some embodiments, a viral vector can include, but is not limited, to a retroviral, lentiviral, adenoviral, adeno-associated, or herpes simplex viral vector. A vector as defined herein can transform a prokaryotic or eukaryotic host either by integration into the cellular genome or exist extrachromosomally (e.g. autonomous replicating plasmid with an origin of replication). Additionally included are shuttle vectors by which is meant a DNA vehicle capable, naturally or by design, of replication in two different host organisms, which may be selected from actinomycetes and related species, bacteria and eukaryotic (e.g. higher plant, mammalian, yeast or fungal cells). In some embodiments, the nucleic acid in the vector is under the control of, and operably linked to, an appropriate promoter or other regulatory elements for transcription in a host cell. The vector may be a bi-functional expression vector which functions in multiple hosts. In the case of genomic DNA, this may contain its own promoter and/or other regulatory elements and in the case of cDNA this may be under the control of an appropriate promoter and/or other regulatory elements for expression in the host cell. A variety of eukaryotic expression vectors, containing a cloning site into which a polynucleotide can be operatively linked, are well known in the art and some are commercially available from companies such as Stratagene, La Jolla, Calif.; Invitrogen, Carlsbad, Calif.; Promega, Madison, Wis. or BD Biosciences Clontech, Palo Alto, Calif. In one embodiment, the expression vector comprises at least one nucleic acid sequence which is a regulatory sequence necessary for transcription and translation of nucleotide sequences that encode for a peptide/polypeptide/protein of interest. Accordingly, a nucleic acid or polynucleotide of this invention and/or expression cassettes comprising the same may be comprised in vectors as described herein and as known in the art.

[0163] As used herein, “contact,” “contacting,” “contacted,” and grammatical variations thereof, refer to placing the components of a desired reaction together under conditions suitable for carrying out the desired reaction (e.g., transformation, transcriptional control, genome editing, nicking, and/or cleavage). As an example, a target nucleic acid may be contacted with a sequence-specific DNA binding protein (e.g., polynucleotide-guided endonuclease, a CRISPR-Cas endonuclease (e.g., CRISPR-Cas effector protein), a zinc finger nuclease, a transcription activator-like effector nuclease (TALEN) and/or an Argonaute protein)) and a deaminase or a nucleic acid construct encoding the same, under conditions whereby the sequence-specific DNA binding protein, the reverse transcriptase and/or the deaminase are expressed and the sequence-specific DNA binding protein binds to the target nucleic acid, and the reverse transcriptase and/or deaminase may be fused to either the sequence-specific DNA binding protein or recruited to the sequence-specific DNA binding protein (via, for example, a peptide tag fused to the sequence-specific DNA binding protein and an affinity tag fused to the reverse transcriptase and/or deaminase) and thus, the deaminase and/or reverse transcriptase is positioned in the vicinity of the target nucleic acid, thereby modifying the target nucleic acid. Other methods for recruiting reverse transcriptase and/or deaminase may be used that take advantage of other protein-protein interactions, and also RNA-protein interactions and chemical interactions may be used for protein-protein and protein-nucleic acid recruitment.

[0164] As used herein, “modifying” or “modification” in reference to a target nucleic acid includes editing (e.g., mutating), covalent modification, exchanging/substituting nucleic acids/nucleotide bases, deleting, cleaving, nicking, and/or altering transcriptional control of a target nucleic acid. In some embodiments, a modification may include one or more single base changes (SNPs) of any type.

[0165] “Introducing,” “introduce,” “introduced” (and grammatical variations thereof) in the context of a polynucleotide of interest means presenting a nucleotide sequence of interest (e.g., polynucleotide, RT template, a nucleic acid construct, and/or a guide nucleic acid) to a plant, plant part thereof, or cell thereof, in such a manner that the nucleotide sequence gains access to the interior of a cell.

[0166] The terms “transformation” or “transfection” may be used interchangeably and as used herein refer to the introduction of a heterologous nucleic acid into a cell. Transformation of a cell may be stable or transient. Thus, in some embodiments, a host cell or host organism (e.g., a plant) may be stably transformed with a polynucleotide/nucleic acid molecule of the invention. In some embodiments, a host cell or host organism may be transiently transformed with a polynucleotide/nucleic acid molecule of the invention.

[0167] “Transient transformation” in the context of a polynucleotide means that a polynucleotide is introduced into the cell and does not integrate into the genome of the cell.

[0168] By “stably introducing” or “stably introduced” in the context of a polynucleotide introduced into a cell is intended that the introduced polynucleotide is stably incorporated into the genome of the cell, and thus the cell is stably transformed with the polynucleotide.

[0169] “Stable transformation” or “stably transformed” as used herein means that a nucleic acid molecule is introduced into a cell and integrates into the genome of the cell. As such, the integrated nucleic acid molecule is capable of being inherited by the progeny thereof, more particularly, by the progeny of multiple successive generations. “Genome” as used herein includes the nuclear and the plastid genome, and therefore includes integration of the nucleic acid into, for example, the chloroplast or mitochondrial genome. Stable transformation as used herein can also refer to a transgene that is maintained extrachromasomally, for example, as a minichromosome or a plasmid.

[0170] Transient transformation may be detected by, for example, an enzyme-linked immunosorbent assay (ELISA) or Western blot, which can detect the presence of a peptide or polypeptide encoded by one or more transgene introduced into an organism. Stable transformation of a cell can be detected by, for example, a Southern blot hybridization assay of genomic DNA of the cell with nucleic acid sequences which specifically hybridize with a nucleotide sequence of a transgene introduced into an organism (e.g., a plant). Stable transformation of a cell can be detected by, for example, a Northern blot hybridization assay of RNA of the cell with nucleic acid sequences which specifically hybridize with a nucleotide sequence of a transgene introduced into a host organism. Stable transformation of a cell can also be detected by, e.g., a polymerase chain reaction (PCR) or other amplification reactions as are well known in the art, employing specific primer sequences that hybridize with target sequence(s) of a transgene, resulting in amplification of the transgene sequence, which can be detected according to standard methods Transformation can also be detected by direct sequencing and/or hybridization protocols well known in the art.

[0171] Accordingly, in some embodiments, nucleotide sequences, polynucleotides, nucleic acid constructs, and/or expression cassettes of the invention may be expressed transiently and/or they can be stably incorporated into the genome of the host organism. Thus, in some embodiments, a nucleic acid construct of the invention (e.g., one or more expression cassettes comprising polynucleotides for editing as described herein) may be transiently introduced into a cell with a guide nucleic acid and as such, no DNA is maintained in the cell. Thus, the term “transient” transformation refers to a way of introducing molecular tools including at least one nucleic acid (DNA, RNA, single-stranded or double-stranded or a mixture thereof) and/or at least one amino acid sequence, optionally comprising suitable chemical or biological agents, to achieve a transfer into at least one compartment of interest of a cell, including, but not restricted to, the cytoplasm, an organelle, including the nucleus, a mitochondrion, a vacuole, a chloroplast, or into a membrane, resulting in transcription and/or translation and/or association and/or activity of the at least one molecule introduced without achieving a stable integration or incorporation and thus inheritance of the respective at least one molecule introduced into the genome of a cell. The terms “transgene-free” refers to a condition that transgene is not present or found in the genome of a host cell or tissue or organism of interest.

[0172] A nucleic acid construct of the invention may be introduced into a plant cell by any method known to those of skill in the art. Non-limiting examples of transformation methods include transformation via bacterial-mediated nucleic acid delivery (e.g., via Agrobacteria), viral-mediated nucleic acid delivery, silicon carbide or nucleic acid whisker-mediated nucleic acid delivery, liposome mediated nucleic acid delivery, microinjection, microparticle bombardment, calcium-phosphate-mediated transformation, cyclodextrin-mediated transformation, electroporation, nanoparticle-mediated transformation, sonication, infiltration, PEG-mediated nucleic acid uptake, as well as any other electrical, chemical, physical (mechanical) and/or biological mechanism that results in the introduction of nucleic acid into the plant cell, including any combination thereof. Procedures for transforming both eukaryotic and prokaryotic organisms are well known and routine in the art and are described throughout the literature (See, for example, Jiang et al. 2013. Nat. Biotechnol. 31:233-239; Ran et al. Nature Protocols 8:2281-2308 (2013)). General guides to various plant transformation methods known in the art include Miki et al. (“Procedures for Introducing Foreign DNA into Plants” in Methods in Plant Molecular Biology and Biotechnology, Glick, B. R. and Thompson, J. E., Eds. (CRC Press, Inc., Boca Raton, 1993), pages 67-88) and Rakowoczy-Trojanowska (Cell. Mol. Biol. Lett. 7:849-858 (2002)).

[0173] In some embodiments of the invention, transformation of a cell may comprise nuclear transformation. In other embodiments, transformation of a cell may comprise plastid transformation (e.g., chloroplast transformation). In still further embodiments, nucleic acids of the invention may be introduced into a cell via conventional breeding techniques. In some embodiments, one or more of the polynucleotides, expression cassettes and/or vectors may be introduced into a plant cell via Agrobacterium transformation.

[0174] A polynucleotide therefore can be introduced into a plant, plant part, plant cell in any number of ways that are well known in the art. The methods of the invention do not depend on a particular method for introducing one or more nucleotide sequences into a plant, only that they gain access to the interior the cell. Where more than polynucleotide is to be introduced, they can be assembled as part of a single nucleic acid construct, or as separate nucleic acid constructs, and can be located on the same or different nucleic acid constructs. Accordingly, the polynucleotide can be introduced into the cell of interest in a single transformation event, or in separate transformation events, or, alternatively, a polynucleotide can be incorporated into a plant as part of a breeding protocol.

[0175] The term “sequence identity” refers to the percentage of bases or amino acids between two polynucleotide or polypeptide sequences that are the same, and in the same relative position. As such one polynucleotide or polypeptide sequence has a certain percentage of sequence identity compared to another polynucleotide or polypeptide sequence. For sequence comparison, typically one sequence acts as a reference sequence, to which test sequences are compared. The term “reference sequence” refers to a molecule to which a test sequence is compared. Identity can be readily calculated by known methods including, but not limited to, those described in: Computational Molecular Biology (Lesk, A. M., ed.) Oxford University Press, New York (1988); Biocomputing: Informatics and Genome Projects (Smith, D. W., ed.) Academic Press, New York (1993); Computer Analysis of Sequence Data, Part I (Griffin, A. M., and Griffin, H. G., eds.) Humana Press, New Jersey (1994); Sequence Analysis in Molecular Biology (von Heinje, G., ed.) Academic Press (1987); and Sequence Analysis Primer (Gribskov, M. and Devereux, J., eds.) Stockton Press, New York (1991).

[0176] As used herein, the term “percent sequence identity” or “percent identity” refers to the percentage of identical nucleotides in a linear polynucleotide sequence of a reference (“query”) polynucleotide molecule (or its complementary strand) as compared to a test (“subject”) polynucleotide molecule (or its complementary strand) when the two sequences are optimally aligned. In some embodiments, “percent identity” can refer to the percentage of identical amino acids in an amino acid sequence as compared to a reference polypeptide.

[0177] As used herein, the phrase “substantially identical,” or “substantial identity” in the context of two nucleic acid molecules, nucleotide sequences, or polypeptide sequences, refers to two or more sequences or subsequences that have at least about 70%, 71%, 72%, 73%, 74%, 75%, 76%, 77%, 78%, 79%, 80%, 81%, 82%, 83%, 84%, 85%, 86%, 87%, 88%, 89%, 90%, 91%, 92%, 93%, 94%, 95%, 96%, 97%, 98%, 99%, 99.5% or 100% nucleotide or amino acid residue identity, when compared and aligned for maximum correspondence, as measured using one of the following sequence comparison algorithms or by visual inspection. In some embodiments of the invention, the substantial identity exists over a region of consecutive nucleotides of a nucleotide sequence of the invention that is about 10 nucleotides to about 20 nucleotides, about 10 nucleotides to about 25 nucleotides, about 10 nucleotides to about 30 nucleotides, about 15 nucleotides to about 25 nucleotides, about 30 nucleotides to about 40 nucleotides, about 50 nucleotides to about 60 nucleotides, about 70 nucleotides to about 80 nucleotides, about 90 nucleotides to about 100 nucleotides, about 100 nucleotides to about 200 nucleotides, about 100 nucleotides to about 300 nucleotides, about 100 nucleotides to about 400 nucleotides, about 100 nucleotides to about 500 nucleotides, about 100 nucleotides to about 600 nucleotides, about 100 nucleotides to about 800 nucleotides, about 100 nucleotides to about 900 nucleotides, or more in length, or any range therein, up to the full length of the sequence. In some embodiments, nucleotide sequences can be substantially identical over at least about 20 nucleotides (e.g., about 20, 21, 22, 23, 24, 25, 26, 27, 28, 29, 30, 31, 32, 33, 34, 35, 36, 37, 38, 39, 40, 50, 60, 70, 80, 90, 100, 150, 200, 300, 400, 500, 600, 700, 800, or 900 nucleotides or more).

[0178] In some embodiments of the invention, the substantial identity exists over a region of consecutive amino acid residues of a polypeptide of the invention that is about 3 amino acid residues to about 20 amino acid residues, about 5 amino acid residues to about 25 amino acid residues, about 7 amino acid residues to about 30 amino acid residues, about 10 amino acid residues to about 25 amino acid residues, about 15 amino acid residues to about 30 amino acid residues, about 20 amino acid residues to about 40 amino acid residues, about 25 amino acid residues to about 40 amino acid residues, about 25 amino acid residues to about 50 amino acid residues, about 30 amino acid residues to about 50 amino acid residues, about 40 amino acid residues to about 50 amino acid residues, about 40 amino acid residues to about 70 amino acid residues, about 50 amino acid residues to about 70 amino acid residues, about 60 amino acid residues to about 80 amino acid residues, about 70 amino acid residues to about 80 amino acid residues, about 90 amino acid residues to about 100 amino acid residues, or more amino acid residues in length, and any range therein, up to the full length of the sequence. In some embodiments, polypeptide sequences can be substantially identical to one another over at least about 8 consecutive amino acid residues (e.g., about 8, 9, 10, 11, 12, 13, 14, 15, 16, 17, 18, 19, 20, 21, 22, 23, 24, 25, 26, 27, 28, 29, 30, 31, 32, 33, 34, 35, 36, 37, 38, 39, 40, 41, 42, 43, 44, 45, 46, 47, 48, 49, 50, 51, 52, 53, 54, 55, 56, 57, 58, 59, 60, 61, 62, 63, 64, 65, 66, 67, 68, 69, 70, 71, 72, 73, 74, 75, 76, 77, 78, 79, 80, 81, 82, 83, 84, 85, 86, 87, 88, 89, 90, 91, 92, 93, 94, 95, 96, 97, 98, 99, 100, 101, 102, 103, 104, 105, 106, 107, 108, 109, 110, 111, 112, 113, 114, 115, 116, 117, 118, 119, 120, 130, 140, 150, 175, 200, 225, 250, 300, 350, 400, 450, or 500 or more amino acids in length or more consecutive amino acid residues). In some embodiments, two or more myrosinase polypeptides, two or more AOP2 polypeptides or two or more CYP79F1 polypeptides may be identical (100%) or substantially identical (e.g., at least 70% to 99.9% identical; e.g., about 70%, 71%, 72%, 73%, 74%, 75%, 76%, 77%, 78%, 79%, 80%, 81%, 82%, 83%, 84%, 85%, 86%, 87%, 88%, 89%, 90%, 91%, 92%, 93%, 94%, 95%, 96%, 97%, 98%, 99%, 99.5%. 99.9% identical or any range or value therein) to one another. In some embodiments, two or more myrosinase polypeptides, two or more AOP2 polypeptides or two or more CYP79F1 polypeptides proteins may be substantially identical across 10, 11, 12, 13, 14, 15, 16, 17, 18, 19, 20, 21, 22, 23, 24, 25, 26, 27, 28, 29, 30, 31, 32, 33, 34, 35, 36, 37, 38, 39 to about 40, 41, 42, 43, 45, 46, 47, 48, 49, 50, 51, 52, 53, 54, 55, 56, 57, 58, 59, 60, 61, 62, 63, 64, 65, 66, 67, 68, 69, 70, 71, 72, 73, 74, 75, 76, 77, 78, 79, 80, 81, 82, 83, 84, 85, 86, 87, 88, 89, 90, 91, 92, 93, 94, 95, 96, 97, 98, 99, 100, 101, 102, 103, 104, 105, 106, 107, 108, 109, 110, 111, 112, 113, 114, 115, 116, 117, 118, 119, 120, 125, 130, 135, 140, 145, 150, 155, 160, 165, 170, 175, 180, 185, 190, 195, 200, 205, 210, 215, 220, 225, 230, 235, 240, 245, 250, 275, 300, 325, 350, 375, 400, 425, 450, 475, 500, 525, 540 or more consecutive amino acid residues. In some embodiments, two or more myrosinase polypeptides, two or more AOP2 polypeptides or two or more CYP79F1 polypeptides proteins may be substantially identical across 10, 15, 20, 25, 30 to 350, 400, 450, 500, or 540 or more of any one of the amino acid sequences of SEQ ID NOs:93-105, 115, 128-132, 617-679 or 743-786.

[0179] “Complementary” or “complementarity” refers to the capacity for pairing, through base stacking and specific hydrogen bonding, between two sequences comprising naturally or non-naturally occurring bases or analogs thereof. For example, if a base at one position of a nucleic acid is capable of hydrogen bonding with a base at the corresponding position of a target, then the bases are considered to be complementary to each other at that position. Nucleic acids can comprise universal bases, or inert abasic spacers that provide no positive or negative contribution to hydrogen bonding. Base pairings may include both canonical Watson-Crick base pairing and non-Watson-Crick base pairing (e.g., Wobble base pairing and Hoogsteen base pairing). It is understood that for complementary base pairings, adenosine-type bases (A) are complementary to thymidine-type bases (T) or uracil-type bases (U), that cytosine-type bases (C) are complementary to guanosine-type bases (G), and that universal bases such as such as 3-nitropyrrole or 5-nitroindole can hybridize to and are considered complementary to any A, C, U, or T. Nichols et al., Nature, 1994;369:492-493 and Loakes et al., Nucleic Acids Res., 1994; 22:4039-4043. Inosine (I) has also been considered in the art to be a universal base and is considered complementary to any A, C, U, or T. See Watkins and Santa Lucia, Nucl. Acids Research, 2005; 33 (19): 6258-6267.

[0180] As referred to herein, a “complementary nucleic acid sequence” is a nucleic acid sequence comprising a sequence of nucleotides that enables it to non-covalently bind to another nucleic acid in a sequence-specific, antiparallel, manner (i.e., a nucleic acid specifically binds to a complementary nucleic acid) under the appropriate in vitro and/or in vivo conditions of temperature and solution ionic strength. Complementarity between two single-stranded molecules may be “partial,” in which only some of the nucleotides bind, or it may be complete when total complementarity exists between the single stranded molecules. The degree of complementarity between nucleic acid strands has significant effects on the efficiency and strength of hybridization between nucleic acid strands.

[0181] “Complement,” as used herein, can mean 100% complementarity with the comparator nucleotide sequence or it can mean less than 100% complementarity (e.g., about 70%, 71%, 72%, 73%, 74%, 75%, 76%, 77%, 78%, 79%, 80%, 81%, 82%, 83%, 84%, 85%, 86%, 87%, 88%, 89%, 90%, 91%, 92%, 93%, 94%, 95%, 96%, 97%, 98%, 99%, and the like, complementarity) to the comparator nucleotide sequence.

[0182] Methods of sequence alignment for comparison and determination of percent sequence identity and percent complementarity are well known in the art. Optimal alignment of sequences for comparison can be conducted, e.g., by the homology alignment algorithm of Needleman and Wunsch, (1970) J. Mol. Biol. 48:443, by the search for similarity method of Pearson and Lipman, (1988) Proc. Nat'l. Acad. Sci. USA 85:2444, by computerized implementations of these algorithms (GAP, BESTFIT, FASTA, and TFASTA in the Wisconsin Genetics Software Package, Genetics Computer Group, 575 Science Dr., Madison, Wis.), by manual alignment and visual inspection (see, e.g., Brent et al., (2003) Current Protocols in Molecular Biology), by use of algorithms know in the art including the BLAST and BLAST 2.0 algorithms, which are described in Altschul et al., (1977) Nuc. Acids Res. 25:3389-3402; and Altschul et al., (1990) J. Mol. Biol. 215:403-410, respectively. Software for performing BLAST analyses is publicly available through the National Center for Biotechnology Information. Some alignment programs are MacVector (Oxford Molecular Ltd, Oxford, U.K.), ALIGN Plus (Scientific and Educational Software, Pennsylvania) and AlignX (Vector NTI, Invitrogen, Carlsbad, Calif.). Another alignment program is Sequencher (Gene Codes, Ann Arbor, Mich.), using default parameters, and MUSCLE (Multiple Sequence Comparision by Log-Expection; a computer software licensed as public domain).

[0183] As used herein, the term “hybridize” refers to pairing between complementary nucleotide bases (e.g., adenine (A) forms a base pair with thymine (T) in a DNA molecule and with uracil (U) in an RNA molecule, and guanine (G) forms a base pair with cytosine (C) in both DNA and RNA molecules) to form a double-stranded nucleic acid molecule. (See, e.g., Wahl and Berger (1987) Methods Enzymol. 152:399; Kimmel, (1987) Methods Enzymol. 152:507). In addition, it is also known in the art that for hybridization between two RNA molecules (e.g., dsRNA), guanine (G) base pairs with uracil (U). For example, G/U base-pairing is partially responsible for the degeneracy (i.e., redundancy) of the genetic code in the context of tRNA anti-codon base-pairing with codons in mRNA. In the context of this disclosure, a guanine (G) of a protein-binding segment (dsRNA duplex) of a guide RNA molecule is considered complementary to a uracil (U), and vice versa. As such, when a G/U base-pair can be made at a given nucleotide position a protein-binding segment (dsRNA duplex) of a guide RNA molecule, the position is not considered to be noncomplementary, but is instead considered to be complementary. It is understood in the art that the sequence of polynucleotide need not be 100% complementary to that of its target nucleic acid to be specifically hybridizable. Moreover, a polynucleotide may hybridize over one or more segments such that intervening or adjacent segments are not involved in the hybridization event (e.g., a loop structure or hairpin structure). A polynucleotide can comprise at least 70%, at least 80%, at least 90%, at least 95%, at least 99%, or 100% sequence complementarity to a target region within the target nucleic acid sequence to which they are targeted.

[0184] The term “gene edited plant,” “gene edited plant part” or “gene edited plant cell” as used herein refers to a plant, part thereof or cell that comprises one or more endogenous genes that are edited by a gene editing system. The gene editing system of the present invention comprises a targeting element and/or an editing element. The targeting element is capable of recognizing a target genomic sequence. The editing element is capable of modifying the target genomic sequence, e.g., by substitution or insertion of one or more nucleotides in the genomic sequence, deletion of one or more nucleotides in the genomic sequence, alteration of genomic sequences to include regulatory sequences, insertion of transgenes at a safe harbor genomic site or other specific location in the genome, and/or any combination thereof. A targeting element and an editing element can be on the same nucleic acid molecule or different nucleic acid molecules. In some embodiments, the editing element is capable of precise genome editing by substitution of a single nucleotide using a base editor, such cytosine base editor (CBE) and/or adenine base editor (ABE), which is directly or indirectly fused to a CRISPR-Cas effector protein.

[0185] General methods in molecular and cellular biochemistry can be found in such standard textbooks as Molecular Cloning: A Laboratory Manual, 3rd Ed. (Sambrook et al., HaRBor Laboratory Press 2001); Short Protocols in Molecular Biology, 4th Ed. (Ausubel et al. eds., John Wiley & Sons 1999); Protein Methods (Bollag et al., John Wiley & Sons 1996); Nonviral Vectors for Gene Therapy (Wagner et al. eds., Academic Press 1999); Viral Vectors (Kaplift & Loewy eds., Academic Press 1995); Immunology Methods Manual (I. Lefkovits ed., Academic Press 1997); and Cell and Tissue Culture: Laboratory Procedures in Biotechnology (Doyle & Griffiths, John Wiley & Sons 1998), the disclosures of which are incorporated herein by reference.

[0186] As used herein, the term “plant” refers to whole plants. The term “plant part” includes differentiated and undifferentiated tissues including, but not limited to: plant organs, plant tissues, roots, stems, shoots, rootstocks, scions, stipules, petals, leaves, flowers, ovules, pollens, bracts, petioles, internodes, bark, pubescence, tillers, rhizomes, fronds, blades, stamens, fruits, seeds, tumor tissue and plant cells (e.g., single cells, protoplasts, embryos, and callus tissue). Plant cells include, without limitation, cells from seeds, suspension cultures, embryos, meristematic regions, callus tissue, leaves, roots, shoots, gametophytes, sporophytes, pollen and microspores. The plant tissue may be in a plant or in a plant organ, tissue or cell culture. Thus, the term “plant part,” as used herein, includes but is not limited to reproductive tissues (e.g., petals, sepals, stamens, pistils, receptacles, anthers, pollen, flowers, fruits, flower bud, ovules, seeds, and embryos); vegetative tissues (e.g., petioles, stems, roots, root hairs, root tips, pith, coleoptiles, stalks, shoots, branches, bark, apical meristem, axillary bud, cotyledon, hypocotyls, and leaves); vascular tissues (e.g., phloem and xylem); specialized cells such as epidermal cells, parenchyma cells, chollenchyma cells, schlerenchyma cells, stomates, guard cells, cuticle, mesophyll cells; callus tissue; and cuttings. The term “plant part” also includes plant cells, including plant cells that are intact in plants and/or parts of plants, plant protoplasts, plant tissues, plant organs, plant cell tissue cultures, plant calli, plant clumps, and the like. As used herein, “shoot” refers to the above ground parts including the leaves and stems. As used herein, the term “tissue culture” encompasses cultures of tissue, cells, protoplasts and callus. The term “stem” as used herein refers the above ground structural axis of the plant consisting of both nodes (e.g., leaves and flowers) and internodes (e.g., connecting material between nodes).

[0187] As used herein, “plant cell” refers to a structural and physiological unit of the plant, which typically comprise a cell wall but also includes protoplasts. A plant cell of the present invention can be in the form of an isolated single cell or can be a cultured cell or can be a part of a higher-organized unit such as, for example, a plant tissue (including callus) or a plant organ. A “protoplast” is an isolated plant cell without a cell wall or with only parts of the cell wall. Thus, in some embodiments of the invention, a transgenic cell comprising a nucleic acid molecule and/or nucleotide sequence of the invention is a cell of any plant or plant part including, but not limited to, a root cell, a leaf cell, a tissue culture cell, a seed cell, a flower cell, a fruit cell, a pollen cell, and the like. In some aspects of the invention, the plant part can be a plant germplasm. In some aspects, a plant cell can be non-propagating plant cell that does not regenerate into a plant.

[0188] “Plant cell culture” means cultures of plant units such as, for example, protoplasts, cell culture cells, cells in plant tissues, pollen, pollen tubes, ovules, embryo sacs, zygotes and embryos at various stages of development.

[0189] The term “plant organ” refers to plant tissue or a group of tissues that constitute a morphologically and functionally distinct part of a plant such as a root, stem, leaf, flower bud, or embryo.

[0190] “Plant tissue” as used herein means a group of plant cells organized into a structural and functional unit. Any tissue of a plant in planta or in culture is included. This term includes, but is not limited to, whole plants, plant organs, plant seeds, tissue culture and any groups of plant cells organized into structural and/or functional units. The use of this term in conjunction with, or in the absence of, any specific type of plant tissue as listed above or otherwise embraced by this definition is not intended to be exclusive of any other type of plant tissue.

[0191] As used herein, the term “tissue culture” indicates a composition comprising isolated cells of the same or a different type or a collection of such cells organized into parts of a plant. Exemplary types of tissue cultures are protoplasts, calli, plant clumps, and plant cells that can generate tissue culture that are intact in plants or parts of plants, such as embryos, pollen, flowers, seeds, leaves, stems, roots, root tips, anthers, pistils, meristematic cells, axillary buds, ovaries, seed coat, endosperm, hypocotyls, cotyledons and the like. In some embodiments of the invention, a transgenic tissue culture or transgenic plant cell culture is provided, wherein the transgenic tissue or cell culture comprises a nucleic acid molecule/nucleotide sequence of the invention. In some embodiments, transgenes may be eliminated from a plant developed from the transgenic tissue or cell by breeding of the transgenic plant with a non-transgenic plant and selecting among the progeny for the plants comprising the desired gene edit and not the transgenes used in producing the edit.

[0192] As used herein, “progeny” comprises any subsequent generation of a plant.

[0193] As used herein, the term “leafy green”, “leafy green plant” or “leafy green vegetable” refers to a part of a plant high in vitamins, minerals and fiber but low in calories. The exemplary non-limiting leafy green plants include kale, collard greens, spinach, cabbage, beet greens, watercress, romaine lettuce, swiss chard, arugula, endive, bok choy, turnip greens, mustard greens cabbage, broccoli, cauliflower, Brussels sprouts, and kohlrabi.

[0194] Any plant or plant part comprising a glucosinolate pathway comprising one or more of a myrosinase, a CYP79F1 or an AOP2 may be useful with this invention. In some embodiments, a plant or plant part is a mustard plant (e.g., Brassicaceae). In some embodiments, the plant or plant part useful with this invention can include a plant from the Caricaceae family (e.g., papaya, e.g., Carica papaya). In some embodiments, the plant or plant part useful with this invention can include a plant from the Moringaceae family (e.g., Moringa spp.; e.g., M. arborea, M. borziana, M. concanensis, M. drouhardii, M. hildebrantii, M. longituba, M. oleifera. M. ovalifolia, M. peregrine, M. pygmaea, M. rivae, M. ruspoliana, or M. stenopetala).

[0195] Example mustard plants (or parts there of)(e.g., Brassicaceae plant or part thereof). include, but are not limited to, a kale plant or part thereof, a collard plant or part thereof, a spinach plant or part thereof, a cabbage plant or part thereof, a beet plant or part thereof, a watercress plant or part thereof, a lettuce plant or part thereof (e.g. romaine), a swiss chard plant or part thereof, an arugula plant or part thereof, an endive plant or part thereof, a bok choy plant or part thereof, a rutabaga plant or part thereof, a turnip plant or part thereof, a mustard plant or part thereof, a cabbage plant or part thereof, a broccoli plant or part thereof, a cauliflower plant or part thereof, a Brussels sprout plant or part thereof, a radish plant or part thereof, or a kohlrabi plant or part thereof. In some embodiments, a mustard plant or part thereof may include, but is not limited to, Brassica oleracea (e.g., B. oleracea var. oleracea, B. oleracea var. capitata, B. oleracea var. botrytis, B. oleracea var. gemmifera, B. oleracea var. sabauda, B. oleracea var. gongyiodes, B. oleracea var. italic, B. oleracea var. sabellica, B. oleracea var. acephala), Brassica juncea, Brassica rapa (B. rapa subsp. pekinensis, B. rapa subsp. Chinensis, B. rapa subsp. rapa), Brassica napas, Brassica carinata, Brassica campestris Brassica nigra or Raphanus raphanistrum (e.g., Raphanus raphanistrum subsp. Sativus).

[0196] Vegetables are known as “protective foods” in human diet with varied health benefits attributable to richness in vitamins, essential fatty acids, minerals, amino acids and dietary fiber and various essential bioactive compounds, including health-promoting plant secondary metabolites composed of antioxidants and phenolic compounds. Globally, crop diversity and nutritional value of vegetable crops are of special significance for improving food and nutrition security.

[0197] Plants are major sources of numerous bioactive compounds collectively termed as phytochemicals, which are reported to be key to good health. The composition of phytochemicals is very distinctive and varies widely amongst plants. For instance, vegetables that belong to the Alliaceae family (e.g., onions, garlic, shallots, leek, Welsh onion, chives and etc.) are characterized by thiosulfides and flavonoids. Cruciferous vegetables that belong to the Brassicaceae family (e.g., brussels sprout, cabbage, cauliflower, mustard, kale, broccoli and etc.) contain high sources of glucosinolates, and those that belong to Cucurbitaceae family (e.g., squash, pumpkin, cucumber, melon, bitter gourd and etc.) are rich in carotenoids and tocopherols. Other plants that comprise higher levels of glucosinolates include the Caricaceae family and the Moringaceae family.

[0198] The Brassicaceae (also called Cruciferae) family, commonly known as the mustard family. The genus Brassica is a member of the tribe Brassiceae in the mustard family (Warwick, S. I., A. Francis and R. K. Gugel (2009), “Guide to wild germplasm: Brassica and allied crops (Tribe Brassiceae, Brassicaceae)”, Third Edition, brassica.info/info/publications/guidewild-germplasm.php). The Brassica genus includes many economically important plants such as leaf and root vegetables, oilseed and condiment crops, and the model plant Arabidopsis thaliana. Brassicaceae vegetables are widely cultivated, with many genera, species, and cultivars including B. carinata (Ethiopian mustard), B. juncea (brown mustard, mustard green), B. napus (rape, Argentine canola, rapeseed and rutabaga), B. nigra (black mustard), B. rapa (field mustard, Polish canola, Chinese cabbage, Chinese mustard, bok choy and turnip), B. oleracea food crops (cabbage, broccoli, cauliflower, Brussels sprouts, kohlrabi and kale) and Raphanus sativus (radish).

[0199] The limitation of the Brassica plants as a feed additive and/or a fresh green leafy vegetable is its relatively high content of glucosinolates. The present invention is directed to reducing the ‘mustard bomb’ reaction and to produce leafy greens with reduced pungency and/or reduced bitterness in flavor and/or odor, which would thereby encourage broader consumption of fresh healthy leafy greens. In addition, the present invention is directed to modifying similar chemical herbivory defense systems, found in other vegetables, to promote the consumption of additional fresh vegetables that are less pungent and/or less bitter.

### Glucosinolates

[0200] Glucosinolates constitute a large family of over 100 related molecules with a common sulfur containing core structure and with side chains of varying size and chemistry (Fahey et al., (2001) Phytochemistry 56: 5-51; Halkier and Gershenzon, (2006) Ann. Rev. Plant Biology 57(1): 303-333). While glucosinolates are found in many plant structures (leaf, vascular tissue, stem, root, and flowers, to cite some examples), they are accumulated in high concentrations in the seed (Bellostas et al., (2004) Agroindustria 3(3): 5-10). This is particularly true for the brassicas. These compounds and their metabolites can impact the taste of the meal, reducing its palatability and in some cases (dependant on the type of glucosinolate and glucosinolate metabolites present) can also impact the health of consumers directly and/or indirectly.

[0201] Glucosinolates, of which nearly 200 types having different substituents have been identified, are grouped into three classes based on the structure of different amino acid precursors: aliphatic glucosinolates, indole glucosinolates, and aromatic glucosinolates.

[0202] Example aliphatic glucosinolates include, but are not limited to, sinigrin, glucoiberin, glucoiberverin, glucoerucin, dehydroerucin, glucoraphanin, glucoraphenin, gluconapin, progoitrin, glucoberteroin, glucoalyssin, glucobrassicanapin, and gluconapoleiferin.

[0203] In some embodiments, indole glucosinolates include, but are not limited to, glucobrassicin, 4-Hyroxyglucobrassicin, 4-Methoxyglucobrassicin, and neoglucobrassicin.

[0204] In some embodiments, aromatic glucosinolates include, but are not limited to, gluconasturtiin.

[0205] Glucosinolates occur as secondary metabolites of almost all plants of the order Brassicales. Ordered in the Brassicales are for example the economically important family Brassicaceae as well as Capparaceae, Moringaceae and Caricaceae. Outside of the Brassicales, the genera Drypetes and Putranjiva in the family Putranjivaceae also produce glucosinolates. Glucosinolates occur in various edible plants such as cabbage (white cabbage, Chinese cabbage, broccoli) watercress, horseradish, capers and radishes where the breakdown products often contribute a significant part of the distinctive taste. The glucosinolates are also found in seeds of these plants.

[0206] Glucosinolates are natural components of many pungent plants such as mustard, cabbage, and horseradish. The pungency (and/or bitterness) of those plants is due to mustard oils produced from glucosinolates when the plant material is chewed, cut, or otherwise damaged. These natural chemicals most likely contribute to plant defense against pests and diseases, and impart a characteristic bitter flavor property of cruciferous vegetables.

[0207] Unique secondary metabolites, glucosinolates (S-glucopyranosyl thiohydroximates), are naturally occurring S-linked glucosides found mainly in Brassicaceae plants but also in plants in the Caracaceae and Moringaceae families. They are enzymatically hydrolyzed to produce sulfate ions, D-glucose, and characteristic degradation products such as isothiocyanates. The functions of glucosinolates in the plants remain unclear, but isothiocyanates possessing a pungent or irritating taste and odor might be associated with plant defense from microbes. The present disclosure provides plants and methods for producing plants with reduced pungency and/or bitterness in flavor and odor by altering and/or modulating the mustard bomb reaction.

### Mustard Bomb Reaction

[0208] In response to biotic challenges, plants have evolved a broad variety of defense mechanisms. Plants have developed physical and chemical barriers using inducible defenses, one of which is the glucosinolate—myrosinase system (FIG. 6), also referred to as the “mustard oil bomb” or “mustard bomb” reaction. Cruciferous plants (such as plants in the Brassicaceae family (e.g., Brassica spp.)) and other glucosinolate producing plant species synthesize glucosinolates, a class of plant secondary compounds that share a core consisting of a β-thioglucose moiety and a sulfonated oxime, but differ by a variable side chain derived from one of several amino acids. However, intact glucosinolates have limited biological activity. Their potency arises when plant tissue is damaged, and glucosinolates come into contact with plant myrosinase, a β-thioglucosidase. In intact tissue, this enzyme is stored separate from glucosinolates (Matile P. H. Matile P. H. (1980) Biochem. Physiol. Pflanz. 175,722-731; Bones A. M. Bones A. M. & Rossiter, J. T. (1996) Physiol. Plant. 97,194-208). Myrosinase removes the β-glucose moiety from glucosinolates, leading to the formation of an unstable intermediate, and, finally, to a variety of toxic breakdown products. These compounds have diverse biological activity ranging from feeding deterrent to pungent taste/flavor.

[0209] Within Brassicaceae, a specialized chemical reaction has evolved which is mediated by a spatially separated enzyme (myrosinase) and substrate pool (glucosinolates). Upon tissue damage (i.e. herbivory), myrosinases come into contact with the glucosinolates and various degradation products can be produced; some of which are strongly pungent (i.e. allyl isothiocyanate; AITC) (FIG. 6). Thus, this reaction has evolved as an anti-herbivory mechanism.

[0210] Genetic engineering approaches using T-DNA insertion was used to disarm and functionally characterize the mustard bomb reaction. Specifically, characterization of Arabidopsis T-DNA insertion mutants identified a critical role for 2 out of the 3 known Type I myrosinases for regulating the chemical reaction (Barth and Jander, Plant J. 46(4) 549-562 (2006)). In B. juncea, lRNAi-mediated silencing of regulators (MYB28, AOP2) involved in the secondary metabolism of glucosinolates (Augustine and Bisht, Phytochem. 117.43-50 (2015)); Augustine et al., Plant Biotechnol J. 11(7):855-866 (2013)). Characterization of 84 natural accessions of B. napus genetically associated MYB28 to a QTL for glucosinolate content in seeds (Harper et al. Nature Biotechnol. 30, 798-802 (2012)).

[0211] Reduction of glucosinolates degradation products (e.g., isothiocyanates) in plants is an objective of the present invention and plants comprising reduced ability to produce glucosinolate degradation products can have significant nutritional benefits. Thus, the present disclosure is directed to a targeted gene editing approach to disarm the mustard bomb reaction by disruption of glucosinolate metabolism through knockouts of genes encoding myrosinase enzymes (see, e.g., FIG. 6 and FIG. 7), AOP2 enzymes, and/or CYP79F1 enzymes. In some embodiments, aliphatic glucosinolate metabolism is disrupted by gene-editing systems. In some embodiments, indole glucosinolate metabolism is disrupted by gene-editing systems. In some embodiments, aromatic glucosinolate metabolism is disrupted by gene-editing systems.

[0212] In some embodiments, genes encoding myrosinase enzymes (i.e., glucosinolase, thioglucosidase (e.g., β-thioglucosidase), thioglucoside glucohydrolase; EC 3.2.1.147 (EC 3.2.3.1 transferred to 3.2.1.147)), are targeted to be knocked out so that the target genes are functionally inoperative in a host plant cell, tissue and/or whole plant. In some embodiments, genes encoding AOP2 enzymes (i.e., a 2-oxo acid-dependent dioxygenase; EC 1.14.11.M8) are targeted to be knocked out so that the target genes are functionally inoperative in a host plant cell, tissue and/or whole plant. In some embodiments, genes encoding CYP79F1 enzymes (i.e., a cytochrome P450 mono-oxygenase, homomethionine N-monooxygenase; EC 1.14.14.42) are targeted to be knocked out so that the target genes are functionally inoperative in a host plant cell, tissue and/or whole plant.

[0213] Significant diversity exists within Brassica spp. and the cultivars within these species. For example, in Brassica juncea, there is a wide variation of leaf shapes, colors, textures and phenological traits across cultivars. The present disclosure teaches that the available leafy B. juncea cultivars are accompanied with pungency and/or bitterness when fresh leaves are consumed, which is perceived as a potential barrier for the broad adoption of fresh leafy vegetables, for example mustard greens, within the consumer space. However, the consumption of the fresh green leafy Brassica vegetables would provide the consumer with a greater nutritious benefit than other readily available lettuce options such as romaine and iceberg.

[0214] According to the present invention, a modified plant cell(s) as described herein demonstrates an altered expression or function of one or more endogenous target genes. In some embodiments, the expression of an endogenous target gene in a particular pathway (e.g., the glucosinolate biosynthesis or glucosinolate breakdown, e.g., endogenous myrosinase genes, endogenous CYP79F1 genes, and/or endogenous AOP2 genes) is reduced in the modified plant cells. In some embodiments, the expression of a plurality (e.g., two or more) of endogenous target genes in a particular pathway is reduced in the modified plant cell(s). For example, the expression of 2, 3, 4, 5, 6, 7, 8, 9, 10, 11, 12, 13, or 14, or more endogenous target genes in a particular pathway may be reduced. In some embodiments, the expression of an endogenous target gene in one pathway and the expression of an endogenous target gene(s) in another pathway may be reduced in the modified plant cells. In some embodiments, the expression of a plurality of endogenous target genes in one pathway and the expression of a plurality of endogenous target genes in another pathway may be reduced in the modified plant cell(s). For example, the expression of 2, 3, 4, 5, 6, 7, 8, 9, 10, 11, 12, 13, or 14, or more endogenous target genes in one pathway may be reduced and the expression of 2, 3, 4, 5, 6, 7, 8, 9, 10, 11, 12, 13, or 14, or more endogenous target genes in another pathway may be reduced. In some embodiments, the expression of a plurality of endogenous target genes in a plurality of pathways may be reduced. For example, the expression of one endogenous gene from each of a plurality of pathways (e.g., 2, 3, 4, 5, 6, 7, 8, 9, 10, 11, 12, 13, or 14, or more pathways) may be reduced. In some aspects, the expression of a plurality of endogenous genes (e.g., 2, 3, 4, 5, 6, 7, 8, 9, 10, 11, 12, 13, or 14, or more e genes) from each of a plurality of pathways (e.g., 2, 3, 4, 5, 6, 7, 8, 9, 10, 11, 12, 13, or 14, or more pathways) may be reduced.

[0215] In some embodiments, the function of a protein encoded by an endogenous target gene in a particular pathway (e.g., glucosinolate biosynthesis or breakdown) is altered in the modified plant cell(s). In some embodiments, the functions of proteins encoded by a plurality (e.g., two or more) of endogenous target genes in a particular pathway are altered in the modified plant cell(s) (e.g., glucosinolate biosynthesis or breakdown). For example, the function of proteins encoded by 2, 3, 4, 5, 6, 7, 8, 9, 10, 11, 12, 13, or 14, or more endogenous target genes in a particular pathway may be altered. In some embodiments, the function of a protein encoded by an endogenous target gene in one pathway and the function of an endogenous target gene in another pathway is altered in the modified plant cells. In some embodiments, the functions of proteins encoded by a plurality of endogenous target genes in one pathway and the function of proteins encoded by a plurality of endogenous target genes in another pathway are altered in the modified plant cells. For example, the function of proteins encoded by 2, 3, 4, 5, 6, 7, 8, 9, 10, 11, 12, 13, or 14, or more endogenous target genes in one pathway may be altered and the function of proteins encoded by 2, 3, 4, 5, 6, 7, 8, 9, 10, 11, 12, 13, or 14, or more endogenous target genes in another particular pathway may be altered. In some embodiments, the functions of proteins encoded by a plurality of endogenous target genes in a plurality of pathways are altered. For example, the function of a protein encoded by one endogenous gene from each of a plurality of pathways (e.g., 2, 3, 4, 5, 6, 7, 8, 9, 10, 11, 12, 13, or 14, or more pathways) may be altered. In additional aspects, the function of proteins encoded by a plurality of endogenous genes (e.g., 2, 3, 4, 5, 6, 7, 8, 9, 10, 11, 12, 13, or 14, or more genes) from each of a plurality of pathways (e.g., 2, 3, 4, 5, 6, 7, 8, 9, 10, 11, 12, 13, or 14, or more pathways) may be altered.

[0216] In some embodiments, the modified plant cells described herein demonstrate an altered expression or function of one or more endogenous target genes encoding myrosinase (i.e., glucosinolase, thioglucosidase (i.e., β-thioglucosidase), thioglucoside glucohydrolase; EC 3.2.1.147 (EC 3.2.3.1 transferred to 3.2.1.147)), encoding 2-oxoglutarate-dependent dioxygenase (i.e., AOP2; EC 1.14.11.M8) or encoding a cytochrome P450 mono-oxygenase (i.e., CYP79F1, homomethionine N-monooxygenase; EC 1.14.14.42) and/or associated with glucosinolate metabolism.

[0217] Various plants in the Brassicaceae family contain multiple forms (orthologs) of myrosinase genes divided into several subfamilies (Rask et al., (2000) Plant Mol. Biol. 42, 93-113; Thangstad et al., (1993) Plant Mol. Biol. 23, 511-524; Xue et al., (1992) Plant Mol, Biol. 18, 387-398). However, only one myrosinase gene family (TGG1-TGG6) is present in Arabidopsis (Xu et al., (2004) Plant Mol. Biol. 55, 343-367). Here, there are two sets of paired myrosinases, each with one intervening gene of unknown function: TGG1 (At5g26000) and TGG2 (At5g25980), and TGGS (At1g51470) and TGG6 (At1g51490). TGG3 (At5g48375) and TGG4 (At1g47600) are single genes.

[0218] In some embodiments, the candidate genes for gene editing in mustard plants can be selected from orthologs of Arabidopsis myrosinase genes (Type I and II) with a total of three of each type. Two Type I myrosinases (TGG1 and TGG2) are required for the production of allyl isothiocyanate (AITC) (Barth and Jander, Plant J. 46(4) 549-562 (2006)).

[0219] In some embodiments, a bioinformatics approach is used to identify myrosinase orthologs, e.g., a total of seven B. juncea myrosinase orthologs are identified that are closely related to the Type I myrosinases (TGG1 and TGG2) in Arabidopsis. In some embodiments, expression analyses may be utilized to identify candidate genes encoding myrosinases that show leaf-specific expression.

[0220] In some embodiments, the candidate genes for gene editing in mustard plants are selected from homologs and/or orthologs of Arabidopsis myrosinase genes, selected from TGG1, TGG2, TGG3, TGG4, TGGS, and TGG6, and fragments of said homologs and/or orthologs thereof.

[0221] In order to ensure precise target mutations with the greatest likelihood for disruption of enzymatic properties, sequence analysis was performed relative to the known active site (see, e.g., Burmeister et al., Structure 5, 663-675 (1997)). The inventors have also identified 4 homologs/orthologs that correspond to TGG4/TGGS/TGG6 (Type II myrosinases). Thus, in some embodiments, a myrosinase gene useful for targeting as described herein may be a nucleic acid having at least 80% sequence identity (e.g., 80, 81, 82, 83, 84, 85, 86, 87, 88, 89, 90, 91, 92, 93, 94, 95, 96, 97, 98, 99, or 100%) to any one of the nucleotide sequences of SEQ ID NOs:66-92 or 680-721 or encoding a sequence having at least 80% sequence identity to any one of the amino acid sequences of SEQ ID NOs:93-105, 617-658 or 743-775. In some embodiments, a myrosinase gene useful for targeting as described herein may be comprise any one of the nucleotide sequences of SEQ ID NOs:66-92 or 680-721 or encode any one of the amino acid sequences of SEQ ID NOs:93-105, 617-658 or 743-775. In some embodiments, a plant may comprise more than one myrosinase gene (e.g., 1, 2, 3, 4, 5, 6, 7, 8, 9, 10, 11, 12, or 13 or more) and more than one myrosinase gene may be targeted for editing. In some embodiments, one myrosinase gene is edited to produce a reduced amount of or no myrosinase polypeptide from that edited gene. In some embodiments, at least two myrosinase genes are edited to produce a reduced amount of or no myrosinase polypeptide from each edited gene. In some embodiments, two myrosinase genes are edited to produce a reduced amount of or no myrosinase polypeptide from each of the two edited myrosinase genes. In some embodiments, three myrosinase genes are edited to produce a reduced amount of or no myrosinase polypeptide from each of the three edited myrosinase genes. In some embodiments, four myrosinase genes are edited to produce a reduced amount of or no myrosinase polypeptide from each of the four edited myrosinase genes. In some embodiments, five myrosinase genes are edited to produce a reduced amount of or no myrosinase polypeptide from each of the five edited myrosinase genes. In some embodiments, six myrosinase genes are edited to produce a reduced amount of or no myrosinase polypeptide from each of the six edited myrosinase genes. In some embodiments, seven myrosinase genes are edited to produce a reduced amount of or no myrosinase polypeptide from each of the seven edited myrosinase genes. In some embodiments, eight myrosinase genes are edited to produce a reduced amount of or no myrosinase polypeptide from each of the eight edited myrosinase genes. In some embodiments, nine myrosinase genes are edited to produce a reduced amount of or no myrosinase polypeptide from each of the nine edited myrosinase genes. In some embodiments, ten myrosinase genes are edited to produce a reduced amount of or no myrosinase polypeptide from each of the ten edited myrosinase genes. In some embodiments, eleven myrosinase genes are edited to produce a reduced amount of or no myrosinase polypeptide from each of the eleven edited myrosinase genes. In some embodiments, twelve myrosinase genes are edited to produce a reduced amount of or no myrosinase polypeptide from each of the twelve edited myrosinase genes. In some embodiments, thirteen myrosinase genes are edited to produce a reduced amount of or no myrosinase polypeptide from each of the thirteen edited myrosinase genes.

[0222] In some embodiments, gene editing of target site(s) in a myrosinase gene may be carried out by a targeted insertion/deletion approach using, for example, a CRISPR-Cas effector protein (e.g., Cpf1 or Cas9). This approach can provide spatial context and can ensure that breakage, disruption, and/or damage of protein functionality, optionally within a highly conserved and known functional region of the enzymes.

[0223] In some embodiments, a targeted deletion in a myrosinase gene results in an in-frame or an out-of-frame deletion. In some embodiments, a targeted deletion in a myrosinase gene results in an in-frame or an out-of-frame deletion that produces a premature stop codon and optionally a truncated polypeptide. In some embodiments, a targeted deletion is a null allele. In some embodiments the null allele may be a full knockout mutant myrosinase allele, wherein the full knockout mutant myrosinase allele results in the production of a nonfunctional myrosinase protein or no production of a myrosinase protein.

[0224] In some embodiments, gene editing of target site(s) in a myrosinase gene may be carried out via a stable and targeted base-editing approach using, for example, a base editing fusion protein comprising a CRISPR-Cas effector protein and a cytidine deaminase or adenosine deaminase. This approach could serve to selectively and precisely guide base editing approaches which target nucleotides encoding specific residues within, for example, an active site in a myrosinase polypeptide.

[0225] Glucosinolates are nitrogen and sulfur rich secondary metabolites which are derived from amino acids and sugars. They represent one of the largest known groups of secondary metabolites within the Brassicaceae family and have garnered significant attention for both human and animal health. For humans, glucosinolates and their break-down products are commonly associated to health benefits. Conversely, for animal feed, they are often recognized as antinutritive compounds and goitrogenic.

[0226] In some embodiments, the candidate genes for gene editing in mustard plants are selected from genes associated with aliphatic glucosinolate metabolism. In other embodiments, the candidate genes for gene editing in mustard plants are selected from genes associated with indole glucosinolate metabolism. In further embodiments, the candidate genes for gene editing in mustard plants are selected from genes associated with aromatic glucosinolate metabolism. In some embodiments, gene editing of target site(s) in genes associated with aliphatic, indole, or aromatic glucosinolate metabolism occurs by a targeted insertion/deletion approach using a CRISPR-Cas effector protein (e.g., Cpf1 or Cas9), optionally a deletion that produces a truncated protein, optionally a full knockout mutation (e.g., no protein production or production of non-functional protein). This approach provides spatial context and can ensure that breakage, disruption, and/or damage of protein functionality, optionally across highly conserved and known functional regions of the enzymes.

[0227] In some embodiments, gene editing of target site(s) in associated with aliphatic, indole, or aromatic glucosinolate metabolism may occur via a stable and targeted base-editing approach using a base editing fusion protein comprising a CRISPR-Cas effector protein and a base editor (e.g., a cytidine deaminase or adenosine deaminase). This approach could serve to selectively and precisely guide base editing approaches which target specific residues within the active site or may be used to alter codons and produce for example, premature stop codons and truncated proteins.

### MYB Transcription Factors

[0228] Using Arabidopsis as a model, MYB transcription factors were revealed as the major positive transcriptional regulators of glucosinolate biosynthesis, with MYB28 regulating genes involved with aliphatic glucosinolate biosynthesis (Gigolashvili et al., Plant J. 51(2):247-261 (2007)). Sinigrin, which is a predominant glucosinolate in B. juncea and substrate for the production of the pungent AITC compound, originates from methionine in the aliphatic branch of glucosinolate biosynthesis. Previous efforts using RNAi based approaches in B. juncea have functionally demonstrated the role of MYB28 to regulate the pool of aliphatic glucosinolates (Augustine et al., Plant Biotechnol J. 11(7):855-866 (2013)). Additional studies were performed in Brassica napus, Brassica oleracea and Brassica rapa.

[0229] In some embodiments, six MYB28 genes in B. juncea were identified by a bioinformatics analysis. Conserved regions were identified for targeting by, for example, a CRISPR-Cas complex for the generation of insertion/deletion (indel) that, for example, disrupts protein functionality or for targeting by a base-editing system for a stable and targeted single nucleotide substitution/deletion/addition at at least one site.

[0230] In some embodiments, MYB29 transcription factors may have partial redundant function. For example, the biosynthesis of aliphatic glucosinolates compounds can be regulated by transcription factors MYB28 and MYB29, which are partially redundant. (The Impact of the Absence of Aliphatic Glucosinolates on Insect Herbivory in Arabidopsis. Beekwilder, Jules; Wessel van Leeuwen; van Dam, Nicole M; Bertossi, Monica; Grandi, Valentina; et al. PLoS One; San Francisco Vol. 3, Iss. 4, (Apr 2008): e2068).

[0231] Thus, in some embodiments, a candidate gene for gene editing in mustard plants are selected from genes associated with aliphatic glucosinolate metabolism, which include six MYB28 genes identified in B. juncea. In further embodiments, gene editing of target site(s) in B. juncea MYB28 and/or MYB29 genes occurs by a targeted insertion/deletion approach using, for example, Cpf1 or Cas9. This approach provide spatial context and can ensure that breakage, disruption, and/or damage of protein functionality, optionally within, for example, a highly conserved and known functional region of the enzymes. In some embodiments, gene editing of target site(s) in B. juncea MYB28 and/or MYB29genes occurs by a stable and targeted base-editing approach using a base editing fusion protein comprising a CRISPR-Cas effector protein and a cytidine deaminase or adenosine deaminase. This approach may provide selectively and precisely guide base editing in which specific residues may be targeted within, for example, an active site. The present disclosure teaches that gene editing can give rise to precise control for complete disruption of (1) genes encoding myrosinase enzymes, (2) transcription factors regulating the secondary metabolic pool of glucosinolates (such as MYB28 and/or MYB29), or (3) disruption of genes encoding enzymes which are responsible for the conversion of glucosinolates into their final degradation products.

### GSL-ALK (AOP) Enzyme

[0232] Glucosinolates (GSL) are amino acid derived secondary metabolites, invariably present in Brassica plants, which have health and agricultural benefits. Glucoraphanin (GRA) is the most studied glucosinolate with respect to health benefits derived from its breakdown product (sulphoraphane known to posses anti-cancer properties). GRA is present in high quantities in many cruciferous species such as broccoli having the highest amount of GRA. Other members of Brassica oleracea like Chinese kale, cabbage and Brussels sprout also possess significant amounts of GRA. However, numerous Brassica cultivars cultivated for oil seed or leaf consumption contain negligible or low amount of GRA, including B. juncea. Gluconapin (GNA), sinigrin (SIN) and glucobrassicin (GBN) are the major aliphatic glucosinolates present in B. juncea.

[0233] The GSL-ALK or AOP2 (i.e., 2-oxoglutarate-dependent dioxygenase, 2-oxo acid-dependent dioxygenases; EC 1.14.11.M8) plays a role in the secondary modification of aliphatic (methionine-derived) glucosinolates, namely the conversion of methylsulfinylalkyl glucosinolates to form alkenyl glucosinolates, and also influences aliphatic glucosinolate accumulation. (see, e.g., Zhang et al. J. Exp. Bot. 66(2):6205-6218 (2015); Agnieska et al. Nat. Commun. 7:13390 (2016): Neal et al. BMC Plant Biol 10:170 (2010); Burow et al. Mol. Plant 8:1201-1212 (2015)). AOP2 catalyzes the conversion of the beneficial glucoraphanin to the deleterious breakdown products of progoitrin and gluconapin; which are found at high levels in B. juncea and most cultivated Brassicas. Importantly, AOP2 also converts glucoiberin into the breakdown product of sinigrin, which serves as the substrate for myrosinase to produce the pungent compound allyl isothiocyanate (AITC).

[0234] A targeted reduction of AOP2 homologues in B. juncea can have a two-fold benefit; firstly, promotion for the accumulation of glucoraphanin; and secondly, prevention of the accumulation of sinigrin. Importantly, RNAi based suppression of the four AOP2 enzymes in B. juncea resulted in a drastic reduction of sinigrin and significant enrichment of glucoraphanin; without undesirable effects on growth (Augustine and Bisht, Phytochem. 117:43-50 (2015)).

[0235] In some embodiments, gene editing of target site(s) in an AOP2 gene may be carried out by a targeted insertion/deletion approach using, for example, a CRISPR-Cas effector protein (e.g., Cpf1 or Cas9). This approach can provide spatial context and can ensure that breakage, disruption, and/or damage of protein functionality, optionally within a highly conserved and known functional region of the enzymes.

[0236] In some embodiments, gene editing of target site(s) in AOP2 genes (e.g., B. juncea AOP2 genes) may be carried out via stable and targeted base-editing approach using a base editing fusion protein comprising a CRISPR-Cas effector protein and for example, a cytidine deaminase or adenosine deaminase. Using such an approach, specific residues may be selectively and precisely base edited.

[0237] Accordingly, as disclosed herein, targeted alteration of glucosinolate metabolism such as AOP2 genes can be used to reduce pungency and/or bitterness in mustard plants. In some embodiments, genes for gene editing in mustard plants (e.g., leafy greens) may be, for example, genes encoding B. juncea AOP2 enzymes (e.g., BjuA.GSLALK-1, BjuA.GSLALK-2, BjuB.GSLALK-1, BjuB.GSLALK-2). In some embodiments, an AOP2 gene that may modified to reduce pungency and/or bitterness in a mustard plant can include an AOP2 gene that encodes a polypeptide having at least 80% (e.g., about 80, 81, 82, 83, 84, 85, 86, 87, 88, 89, 90, 91, 92, 93, 94, 95, 96, 97, 98, 99, or 100%) sequence identity to any one of the amino acid sequences of SEQ ID NOs:128, 129, 130, 131, 132, 659-673 or 776-781, or comprises a sequence having at least 80% sequence identity to any one of the nucleotide sequences of SEQ ID NOs:118, 119, 120, 121, 122, 123, 124, 125, 126, 127 or 722-736. In some embodiments, an AOP2 gene that may be modified (e.g., edited) to reduce pungency and/or bitterness in a mustard plant can include an AOP2 gene that encodes any one of the amino acid sequences of SEQ ID NOs:128-132, 659-673 or 776-781 or comprises any one of the nucleotide sequences of SEQ ID NOs:118-127 or 722-736.

[0238] In some embodiments, one AOP2 gene is edited to produce a reduced amount of or no AOP2 polypeptide from that edited gene. In some embodiments, at least two AOP2 genes are edited to produce a reduced amount of or no AOP2 polypeptide from each edited gene. In some embodiments, two AOP2 genes are edited to produce a reduced amount of or no AOP2 polypeptide from each of the two edited AOP2 genes. In some embodiments, three AOP2 genes are edited to produce a reduced amount of or no AOP2 polypeptide from each of the three edited AOP2 genes. In some embodiments, four AOP2 genes are edited to produce a reduced amount of or no AOP2 polypeptide from each of the four edited AOP2 genes. In some embodiments, five AOP2 genes are edited to produce a reduced amount of or no AOP2 polypeptide from each of the five edited AOP2 genes

[0239] In some embodiments, a targeted deletion in an AOP2 gene results in an in-frame or an out-of-frame deletion. In some embodiments, a targeted deletion in an AOP2 gene results in an in-frame or an out-of-frame deletion that produces a premature stop codon and optionally a truncated polypeptide. In some embodiments, such a targeted deletion is a null allele. In some embodiments the null allele may be a full knockout mutant AOP2 allele, wherein the full knockout mutant AOP2 allele results in the production of a nonfunctional AOP2 protein or no production of AOP2 protein.

### Cytochrome P450 Mono-Oxygenase (CYP79) Family

[0240] In some embodiments, core glucosinolate biosynthesis may be inhibited to reduce pungency and/or bitterness. In some embodiments, the glucosinolate biosynthetic enzyme cytochrome P450 mono-oxygenase (CYP79F1) (i.e., homomethionine N-monooxygenase) (Reintanz et al. Plant Cell 13(2):351-167 (2001); Hansen et al. J. Biol. Chem 276(14):1178-11085 (2001); Chen et al. Plant J. 33:923-937 (2003); Sharma et al. PLoS One 11(2): e)150060 pages 1-17 (2016); Yin et al. Molecules 20(11).20254-20267 (2015)), which regulates the flux of synthesis after chain elongation of both methionine-derived (Sønderby et al. Trends Plant Sci., 15:283-290 (2010)) and branched-chain amino acid derived glucosinolates may be targeted for modification. As an example, a knockout of CYP79F1 in Arabidopsis thaliana prevented the synthesis of short-chain aliphatic glucosinolates (Reintanz et al. Plant Cel 13(2):351-367 (2001)). In Brassica juncea, loss of function mutation due to a transposable element insertion within the gene results in a nearly signigrin-free plant (Sharma et al. PLoS One 11(2): e)150060 pages 1-17 (2016)).

[0241] Thus, the present disclosure is directed to targeted inhibition of glucosinolate biosynthesis. In some embodiments, the candidate genes for gene editing in mustard plants (e.g., leafy greens) may be those involved with the biosynthesis of aliphatic glucosinolates, which includes, but is not limited to, the cytochrome P450 mono-oxygenase family (CYP79, i.e., homomethionine N-monooxygenase), such as CYP79F1 and CYP79F2. In some embodiments, the gene editing in a plant may be CYP79F1.

[0242] In some embodiments, gene editing of target site(s) in CYP79F1 and/or CYP79F2 homologs or orthologs may be carried out by a targeted insertion/deletion approach using Cpf1 or Cas9. This approach provide spatial context and can ensure that breakage, disruption, and/or damage of protein functionality within a highly conserved and known functional region of the enzymes.

[0243] In further embodiments, gene editing of target site(s) in CYP79F1 and/or CYP79F2 homologs or orthologs occurs by a stable and targeted base-editing approach using a base editing fusion protein comprising a CRISPR-Cas effector protein and a cytidine deaminase or adenosine deaminase. This approach could serve to selectively and precisely guide base editing approaches which target specific residues.

[0244] In some embodiments, gene editing of target site(s) in a CYP79F1 gene may be carried out by a targeted insertion/deletion approach using, for example, a CRISPR-Cas effector protein (e.g., Cpf1 or Cas9). This approach can provide spatial context and can ensure that breakage, disruption, and/or damage of protein functionality, optionally within a highly conserved and known functional region of the enzymes.

[0245] In some embodiments, gene editing of target site(s) in CYP79F1 genes (e.g., B. juncea CYP79F1 genes) may be carried out via stable and targeted base-editing approach using a base editing fusion protein comprising a CRISPR-Cas effector protein and for example, a cytidine deaminase or adenosine deaminase. Using such an approach, specific residues may be selectively and precisely base edited.

[0246] Accordingly, as disclosed herein, targeted alteration of glucosinolate metabolism such as CYP79F1 genes can be used to reduce pungency and/or bitterness in mustard plants. In some embodiments, genes for modifying in mustard plants (e.g., leafy greens) for reducing pungency and/or bitterness may be, for example, genes encoding B. juncea CYP79F1 enzymes. In some embodiments, an CYP79F1 gene that may be edited to reduce pungency and/or bitterness in a mustard plant can include an CYP79F1 that encodes a polypeptide having at least 80% (e.g., about 80, 81, 82, 83, 84, 85, 86, 87, 88, 89, 90, 91, 92, 93, 94, 95, 96, 97, 98, 99, or 100%) sequence identity to any one of the amino acid sequences of SEQ ID NOs:115, 674-679, or 782-786 or may be a gene having at least 80% sequence identity to the nucleotide sequence of SEQ ID NOs:113,114 or 737-742. In some embodiments, an CYP79F1 gene that may be edited to reduce pungency in a mustard plant comprises the nucleotide sequence of SEQ ID NOs:113,114 or 737-742 or encodes the amino acid sequence of SEQ ID NOs:115, 674-679, or 782-786.

[0247] In some embodiments, a targeted deletion in a CYP79F1 gene results in an in-frame or an out-of-frame deletion. In some embodiments, a targeted deletion in a CYP79F1 gene results in an in-frame or an out-of-frame deletion that produces a premature stop codon and optionally a truncated polypeptide. In some embodiments, such a targeted deletion is a null allele. In some embodiments the null allele may be a full knockout mutant CYP79F1 allele, wherein the full knockout mutant CYP79F1 allele results in the production of a nonfunctional CYP79F1 protein

[0248] Gene editing generally refers to the process of modifying the nucleotide sequence of a genome, preferably in a precise or pre-determined manner. Examples of methods of gene editing described herein include methods of using site-directed nucleases to cut deoxyribonucleic acid (DNA) at precise target locations in the genome, thereby creating single-strand or double-strand DNA breaks at particular locations within the genome. Such breaks can be and regularly are repaired by natural, endogenous cellular processes, such as homology-directede pair (HDR) and non-homologous end joining (NHEJ). These two main DNA repair processes consist of a family of alternative pathways. NHEJ directly joins the DNA ends resulting from a double-strand break, sometimes with the loss or addition of nucleotide sequence, which may disrupt or enhance gene expression. HDR utilizes a homologous sequence, or donor sequence, as a template for inserting a defined DNA sequence at the break point. The homologous sequence can be in the endogenous genome, such as a sister chromatid. Alternatively, the donor can be an exogenous nucleic acid, such as a plasmid, a single-strand oligonucleotide, a double-stranded oligonucleotide, a duplex oligonucleotide or a virus, that has regions of high homology with the nuclease-cleaved locus, but which can also contain additional sequence or sequence changes including deletions that can be incorporated into the cleaved target locus. A third repair mechanism can be microhomology-mediated end joining (MMEJ), also referred to as “Alternative NHEJ,” in which the genetic outcome is similar to NHEJ in that small deletions and insertions can occur at the cleavage site. MMEJ can make use of homologous sequences of a few basepairs flanking the DNA break site to drive a more favored DNA end joining repair outcome, and recent reports have further elucidated the molecular mechanism of this process; see, e.g., Cho and Greenberg, Nature 518, 174-76 (2015); Kent et al., Nature Structural and Molecular Biology, Adv. Online doi:10.1038/nsmb.2961(2015); Mateos-Gomez et al., Nature 518, 254-57 (2015); Ceccaldi et al., Nature 528, 258-62 (2015). In some instances, it may be possible to predict likely repair outcomes based on analysis of potential microhomologies at the site of the DNA break.

[0249] “Recombination” refers to a process of exchange of genetic information between two polynucleotides, including but not limited to, donor capture by non-homologous end joining (NHEJ) and homologous recombination. For the purposes of this disclosure, “homologous recombination (HR)” refers to the specialized form of such exchange that takes place, for example, during repair of double-strand breaks in cells via homology-directed repair (HDR) mechanisms. This process requires nucleotide sequence homology, uses a “donor” molecule as a template to repair a “target” molecule (i.e., the one that experienced the double-strand break), and is variously known as “non-crossover gene conversion” or “short tract gene conversion,” because it leads to the transfer of genetic information from the donor to the target. Without wishing to be bound by any particular theory, such transfer can involve mismatch correction of heteroduplex DNA that forms between the broken target and the donor, and/or synthesis-dependent strand annealing, in which the donor is used to resynthesize genetic information that will become part of the target, and/or related processes. Such specialized HR often results in an alteration of the sequence of the target molecule such that part or all of the sequence of the donor polynucleotide is incorporated into the target polynucleotide.

[0250] Gene editing methods contemplated in various embodiments comprise engineered nucleases, designed to bind and cleave a target DNA sequence in a gene of interest, such as genes involved in glucosinolate biosynthesis or breakdown (e.g., a myrosinase, an AOP2, and/or a CYP79F1). The engineered nucleases contemplated in particular embodiments, can be used to introduce a double-strand break in a target polynucleotide sequence, which may be repaired (i) by non-homologous end joining (NHEJ) in the absence of a polynucleotide template, e.g., a donor repair template, or (ii) by homology directed repair (HDR), homologous recombination, in the presence of a donor repair template. Engineered nucleases contemplated in certain embodiments, can also be engineered as nickases, which generate single-stranded DNA breaks that can be repaired using the cell's base-excision-repair (BER) machinery or homologous recombination in the presence of a donor repair template.

[0251] Gene editing via sequence-specific nucleases is known in the art. See e.g., (1) Carroll, D. (2011) Genome engineering with zinc-finger nucleases. Genetics, 188, 773-82; (2) Wood, A. J. et al. (2011) Targeted gene editing across species using ZFNs and TALENs. Science (New York, N.Y.), 333, 307; (3) Perez-Pinera, P. et al. (2012) Advances in targeted gene editing. Current opinion in chemical biology, 16, 268-77, each of which is hereby incorporated by reference in its entirety.

[0252] A nuclease-mediated double-stranded DNA (dsDNA) break in the genome can be repaired by two main mechanisms: Non-Homologous End Joining (NHEJ), which frequently results in the introduction of non-specific insertions and deletions (indels), or homology directed repair (HDR), which incorporates a homologous strand as a repair template. See, e.g., Symington, L. S. and Gautier, J. (2011) Annual Review of Genetics, 45, 247-71, which is hereby incorporated by reference in its entirety.

[0253] When a sequence-specific nuclease is delivered along with a homologous donor DNA construct containing the desired mutations, gene targeting efficiencies are increased by 1000-fold compared to just the donor construct alone. See, e.g., Urnov et al. (2005) Highly efficient endogenous human gene correction using designed zinc-finger nucleases. Nature, 435, 646-51, which is hereby incorporated by reference in its entirety.

[0254] In some embodiments, the gene editing techniques of the present disclosure are used for plants that are modified using any gene editing tool, including, but not limited to: ZFNs, TALENS, CRISPR, and Meganuclease technologies. In some embodiments, the gene editing tools of the present disclosure comprise proteins or polynucleotides which have been custom designed to target and cut at specific deoxyribonucleic acid (DNA) sequences. In some embodiments, gene editing proteins are capable of directly recognizing and binding to selected DNA sequences. In other embodiments, the gene editing tools of the present disclosure form complexes, wherein nuclease components rely on nucleic acid molecules for binding and recruiting the complex to the target DNA sequence.

[0255] In some embodiments, the single component gene editing tools comprise a binding domain capable of recognizing specific DNA sequences in the genome of the plant and a nuclease that cuts double-stranded DNA. The rationale of gene editing technology taught in the present disclosure is the use of a tool that allows the introduction of site-specific mutations in the plant genome or the site-specific integration of genes.

[0256] Many methods are available for delivering genes into plant cells, e.g. transfection, electroporation, viral vectors and Agrobacterium mediated transfer. Genes can be expressed transiently from a plasmid vector. Once expressed, the genes generate the targeted mutation that will be stably inherited, even after the degradation of the plasmid containing the gene.

[0257] Customizable nucleases can be used to make targeted double-stranded breaks (DSB) in living cells, the repair of which can be exploited to induce desired sequence changes. Two competing pathways effect repairs in most cells, including plant cells. Repair of a nuclease-induced DSB by non-homologous end joining (NHEJ) leads to the introduction of insertion/deletion mutations (indels) with high frequencies. By contrast, DSB repair by homology directed repair (HDR) with a user-supplied “donor template” DNA can lead to the introduction of specific alterations (e.g., point mutations and insertions) or the correction of mutant sequences back to wild-type.

[0258] In some embodiments, a mustard plant, plant part, or cell may be modified by gene editing accomplished with engineered nucleases targeting one or more loci that contributes to a target gene of interest, such as genes involved in glucosinolate biosynthesis or breakdown (e.g., a myrosinase, an AOP2, and/or a CYP79F1). Without wishing to be bound to any particular theory, it is contemplated that engineered nucleases are designed to precisely disrupt one or more target genes of interest through gene editing and, once nuclease activity and specificity are validated, lead to predictable disruption of target gene expression and/or function (e.g., disruption of expression of genes involved in glucosinolate biosynthesis or breakdown (e.g., a myrosinase, an AOP2, and/or a CYP79F1), for example, in a plant, thereby reducing the pungency and/or bitterness of the plant.

[0259] The engineered nucleases described herein generate single-stranded DNA nicks or double-stranded DNA breaks (DSB) in a target sequence. Furthermore, a DSB can be achieved in the target DNA by the use of two nucleases generating single-stranded micks (nickases). Each nickase cleaves one strand of the DNA and the use of two or more nickases can create a double strand break (e.g., a staggered double-stranded break) in a target DNA sequence. In other embodiments, the nucleases are used in combination with a donor repair template, which is introduced into the target sequence at the DNA break-site via homologous recombination at a DSB.

[0260] Engineered nucleases described herein that are suitable for gene editing comprise one or more DNA binding domains and one or more DNA cleavage domains (e.g., one or more endonuclease and/or exonuclease domains), and optionally, one or more linkers contemplated herein. An “engineered nuclease” refers to a nuclease comprising one or more DNA binding domains and one or more DNA cleavage domains, wherein the nuclease has been designed and/or modified to bind a DNA binding target sequence adjacent to a DNA cleavage target sequence. The engineered nuclease may be designed and/or modified from a naturally occurring nuclease or from a previously engineered nuclease.

[0261] Illustrative examples of nucleases that may be engineered to bind and cleave a target sequence include, but are not limited to homing endonucleases (meganucleases), megaTALs, transcription activator-like effector nucleases (TALENs), zinc finger nucleases (ZFNs), and clustered regularly-interspaced short palindromic repeats (CRISPR)/Cas nuclease systems.

[0262] In some embodiments, the nucleases contemplated herein comprise one or more heterologous DNA-binding and cleavage domains (e.g., ZFNs, TALENs, megaTALs), (Boissel et al. Nucleic Acids Res 42: 2591-2601 (2014); Christian et al. Genetics 186: 757-761 (2010)). In some embodiments, the DNA-binding domain of a naturally-occurring nuclease may be altered to bind to a selected target site (e.g., a meganuclease that has been engineered to bind to site different than the cognate binding site). For example, meganucleases have been designed to bind target sites different from their cognate binding sites (Boissel et al. Nucleic Acids Res 42: 2591-2601 (2014)). In some embodiments, a nuclease requires a nucleic acid sequence to target the nuclease to a target site (e.g., CRISPR/Cas).

[0263] A “TALEN” refers to an engineered nuclease comprising an engineered TALE DNA binding domain contemplated elsewhere herein and an endonuclease domain (or endonuclease half-domain thereof), and optionally comprise one or more linkers and/or additional functional domains, e.g., an end-processing enzymatic domain of an end-processing enzyme that exhibits 5-3′ exonuclease, 5-3′ alkaline exonuclease, 3-5′exonuclease (e.g., Trex2), 5′ flap endonuclease, helicase or template-independent DNA polymerases activity. Thus, a transcription activator-like effector nuclease (TALEN) comprises a nonspecific DNA-cleaving nuclease (e.g., a Fok I cleavage domain) fused to a DNA-binding domain that can be easily engineered so that TALENs can target essentially any sequence (See, e.g., Joung and Sander, Nature Reviews Molecular Cell Biology 14:49-55 (2013)). Methods for generating engineered TALENs are known in the art, see, e.g., the fast ligation-based automatable solid-phase high-throughput (FLASH) system described in U.S. Ser. No. 61/610,212, and Reyon et al., Nature Biotechnology 30,460-465 (2012); as well as the methods described in Bogdanove & Voytas, Science 333, 1843-1846 (2011); Bogdanove et al., Curr Opin Plant Biol 13, 394-401 (2010); Scholze & Boch, J. Curr Opin Microbiol (2011); Boch et al., Science 326, 1509-1512 (2009); Moscou & Bogdanove, Science 326, 1501 (2009); Miller et al., Nat Biotechnol 29, 143-148 (2011); Morbitzer et al., T. Proc Natl Acad Sci USA 107, 21617-21622 (2010); Morbitzer et al., Nucleic Acids Res 39, 5790-5799 (2011); Zhang et al., Nat Biotechnol 29, 149-153 (2011); Geissler et al., PLoS ONE 6, e19509 (2011); Weber et al., PLoS ONE 6, e19722 (2011); Christian et al., Genetics 186, 757-761 (2010); Li et al., Nucleic Acids Res 39, 359-372 (2011); Mahfouz et al., Proc Natl Acad Sci USA 108, 2623-2628 (2011); Mussolino et al., Nucleic Acids Res (2011); Li et al., Nucleic Acids Res 39, 6315-6325 (2011); Cermak et al., Nucleic Acids Res 39, e82 (2011); Wood et al., Science 333, 307 (2011); Hockemeye et al. Nat Biotechnol 29, 731-734 (2011); Tesson et al., Nat Biotechnol 29, 695-696 (2011); Sander et al., Nat Biotechnol 29, 697-698 (2011); Huang et al., Nat Biotechnol 29, 699-700 (2011); and Zhang et al., Nat Biotechnol 29, 149-153 (2011); each of which is incorporated herein by reference in its entirety. In some embodiments, a TALEN that binds to and cleaves a target region of a locus that contributes to a target gene of interest that may be used to generate plants having reduced pungency and/or reduced bitterness such as genes involved in glucosinolate biosynthesis or breakdown (e.g., a myrosinase, an AOP2, and/or a CYP79F1).

[0264] In some embodiments, a plant of interest may be modified through Transcription activator-like (TAL) effector nucleases (TALENs). TALENS polypeptides comprise repeat polypeptide arms capable of recognizing and binding to specific nucleic acid regions. By engineering the polypeptide arms to recognize selected target sequences, the TAL nucleases can be use to direct double stranded DNA breaks to specific genomic regions. These breaks can then be repaired via recombination to edit, delete, insert, or otherwise modify the DNA of a host organism. In some embodiments, TALENSs are used alone for gene editing (e.g., for the deletion or disruption of a gene). In other embodiments, TALs are used in conjunction with donor sequences and/or other recombination factor proteins that will assist in the Non-homologous end joining (NHEJ) process to replace the targeted DNA region. For more information on the TAL-mediated gene editing compositions and methods of the present disclosure, see U.S. Pat. Nos. 8,440,432; 8,440,432; 8,450,471; 8,586,526; 8,586,363; 8,592,645; 8,697,853; 8,704,041; 8,921,112; and 8,912,138, each of which is hereby incorporated in its entirety.

[0265] A “megaTAL” refers to an engineered nuclease comprising an engineered TALE DNA binding domain and an engineered meganuclease, and optionally comprise one or more linkers and/or additional functional domains, e.g., an end-processing enzymatic domain of an end-processing enzyme that exhibits 5-3′ exonuclease, 5-3′ alkaline exonuclease, 3-5′exonuclease, 5′ flap endonuclease, helicase or template-independent DNA polymerases activity. In some embodiments, a megaTAL nuclease that binds to and cleaves a target region of a locus that contributes to a target gene of interest may be used to generate mustard plants with reduced pungency and/or reduced bitterness by targeting genes involved in glucosinolate biosynthesis or breakdown (e.g., a myrosinase, an AOP2, and/or a CYP79F1).

[0266] A “TALE DNA binding domain” is the DNA binding portion of transcription activator-like effectors (TALE or TAL-effectors), which mimics plant transcriptional activators to manipulate the plant transcriptome (see e.g., Kay et al., 2007. Science 318:648-651). TALE DNA binding domains contemplated in particular embodiments are engineered de novo or from naturally occurring TALEs. Illustrative examples of TALE proteins for deriving and designing DNA binding domains are disclosed in U.S. Pat. No. 9,017,967, and references cited therein, which are incorporated herein by reference in their entireties.

[0267] In some embodiments, plants of interest are modified through megaTALs. In some embodiments, megaTALs are engineered endonucleases capable of targeting selected DNA sequences and inducing DNA breaks.

[0268] A “meganuclease”or “homing endonuclease” (HE) is a sequence-specific endonuclease originating from a variety of organisms such as bacteria, yeast, algae and plant organelles. A number of meganucleases are known in the art, see, e.g., WO 2012010976 (Meganuclease variants cleaving DNA target sequences of the TERT gene); U.S. Pat. Nos. 8,021,867; 8,119,361 and 8,119,381 (I-Crel meganucleases); U.S. Pat. No. 7,897,372 (I-Crel Meganuclease Variants with Modified Specificity), each of which is incorporated herein by reference in its entirety.

[0269] In some embodiments, a homing endonuclease or meganuclease is engineered to bind to, and to introduce single-stranded nicks or double-strand breaks (DSBs) in, one or more loci that contribute to a target gene of interest such as genes involved in glucosinolate biosynthesis or breakdown (e.g., a myrosinase, an AOP2, and/or a CYP79F1). “Homing endonuclease” and “meganuclease” are used interchangeably and refer to naturally-occurring nucleases or engineered meganucleases that recognize 12-45 base-pair cleavage sites and are commonly grouped into five families based on sequence and structure motifs: LAGLIDADG, GIY-YIG, HNH, His-Cys box, and PD-(D/E)XK.

[0270] Engineered HEs do not exist in nature and can be obtained by recombinant DNA technology or by random mutagenesis. Engineered HEs may be obtained by making one or more amino acid alterations, e.g., mutating, substituting, adding, or deleting one or more amino acids, in a naturally occurring HE or previously engineered HE. In some embodiments, an engineered HE comprises one or more amino acid alterations to the DNA recognition interface. Engineered HEs contemplated in particular embodiments may further comprise one or more linkers and/or additional functional domains, e.g., an end-processing enzymatic domain of an end-processing enzyme that exhibits 5-3′ exonuclease, 5-3′ alkaline exonuclease, 3-5′exonuclease, 5′ flap endonuclease, helicase or template-independent DNA polymerases activity.

[0271] In some embodiments, a mustard plant may be modified using meganucleases. In some embodiments, meganucleases are engineered endonucleases capable of targeting selected DNA sequences and inducing DNA breaks. In some embodiments, new meganucleases targeting specific regions are developed through recombinant techniques which combine the DNA binding motifs from various other identified nucleases. In other embodiments, new meganucleases are created through semi-rational mutational analysis, which attempts to modify the structure of existing binding domains to obtain specificity for additional sequences. For more information on the use of meganucleases for genome editing, see Silva et al., 2011 Current Gene Therapy 11 pg 11-27; and Stoddard et al., 2014 Mobile DNA 5 pg 7, each of which is hereby incorporated in its entirety.

[0272] “Zinc-finger nucleases” (ZFNs) are composed of programmable, sequence-specific zinc finger DNA-binding modules (see above) linked to a nonspecific DNA cleavage domain, e.g., a Fok I cleavage domain. Methods for making and using ZFNs are known in the art, see, e.g., (Maeder et al., 2008, Mol. Cell, 31:294-301; Joung et al., 2010, Nat. Methods, 7:91-92; Isalan et al., 2001, Nat. Biotechnol., 19:656-660; Sander et al., Nat Methods. 8(1):67-9, 2011; Bhakta et al., Genome Res. 23(3):530-8, 2013). In some embodiments, the ZFNs are described in, or are generated as described in, WO 2011/017293 or WO 2004/099366, each of which is hereby incorporated in its entirety. Additional suitable ZFNs are described in U.S. Pat. Nos. 6,511,808, 6,013,453, 6,007,988, and 6,503,717 and U.S. patent application 2002/0160940, each of which is hereby incorporated in its entirety.

[0273] A “ZFN” refers to an engineered nuclease comprising one or more zinc finger DNA binding domains and an endonuclease domain (or endonuclease half-domain thereof), and optionally comprise one or more linkers and/or additional functional domains, e.g., an end-processing enzymatic domain of an end-processing enzyme that exhibits 5-3′ exonuclease, 5-3′ alkaline exonuclease, 3-5′exonuclease, 5′ flap endonuclease, helicase or template-independent DNA polymerases activity. In some embodiments, a zinc finger nuclease (ZFN) that binds to and cleaves a target region of a locus that contributes to a target gene of interest such as genes involved in glucosinolate biosynthesis or breakdown (e.g., a myrosinase, an AOP2, and/or a CYP79F1). and thus, may be used to modify a plant to reduce its pungency and/or bitterness.

[0274] In some embodiments, targeted double-stranded cleavage is achieved using two ZFNs, each comprising an endonuclease half-domain can be used to reconstitute a catalytically active cleavage domain. In some embodiments, targeted double-stranded cleavage is achieved with a single polypeptide comprising one or more zinc finger DNA binding domains and two endonuclease half-domains.

[0275] In some embodiments, a ZFN comprises a TALE DNA binding domain as discussed herein, a zinc finger DNA binding domain, and an endonuclease domain (or endonuclease half-domain) as discussed herein. In some embodiments, a ZFN comprises a zinc finger DNA binding domain, and a meganuclease as discussed herein.

[0276] In some embodiments, the ZFN comprises a zinger finger DNA binding domain that has one, two, three, four, five, six, seven, or eight or more zinger finger motifs and an endonuclease domain (or endonuclease half-domain). Typically, a single zinc finger motif is about 30 amino acids in length. Zinc fingers motifs include both canonical C₂H₂ zinc fingers, and non-canonical zinc fingers such as, for example, C₃H zinc fingers and C₄ zinc fingers.

[0277] Zinc finger binding domains can be engineered to bind any DNA sequence. Candidate zinc finger DNA binding domains for a given 3 bp DNA target sequence have been identified and modular assembly strategies have been devised for linking a plurality of the domains into a multi-finger peptide targeted to the corresponding composite DNA target sequence. Other suitable methods known in the art can also be used to design and construct nucleic acids encoding zinc finger DNA binding domains, e.g., phage display, random mutagenesis, combinatorial libraries, computer/rational design, affinity selection, PCR, cloning from cDNA or genomic libraries, synthetic construction and the like. (See, e.g., U.S. Pat. No. 5,786,538; Wu et al., PNAS 92:344-348 (1995); Jamieson et al., Biochemistry 33:5689-5695 (1994); Rebar & Pabo, Science 263:671-673 (1994); Choo & Klug, PNAS 91:11163-11167 (1994); Choo & Klug, PNAS 91: 11168-11172 (1994); Desjarlais & Berg, PNAS 90:2256-2260 (1993); Desjarlais & Berg, PNAS 89:7345-7349 (1992); Pomerantz et al., Science 267:93-96 (1995); Pomerantz et al., PNAS 92:9752-9756 (1995); Liu et al., PNAS 94:5525-5530 (1997); Griesman & Pabo, Science 275:657-661 (1997); Desjarlais & Berg, PNAS 91:11-99-11103 (1994)).

[0278] Individual zinc finger motifs bind to a three or four nucleotide sequence. The length of a sequence to which a zinc finger binding domain is engineered to bind (e.g., a target sequence) will determine the number of zinc finger motifs in an engineered zinc finger binding domain. For example, for ZFNs in which the zinc finger motifs do not bind to overlapping subsites, a six-nucleotide target sequence is bound by a two-finger binding domain; a nine-nucleotide target sequence is bound by a three-finger binding domain, etc. In particular embodiments, DNA binding sites for individual zinc fingers motifs in a target site need not be contiguous, but can be separated by one or several nucleotides, depending on the length and nature of the linker sequences between the zinc finger motifs in a multi-finger binding domain.

[0279] In some embodiments, plants of interest are modified through the use of Zinc Finger Nucleases. Three variants of the ZFN technology are recognized in plant genome engineering (with applications ranging from producing single mutations or short deletions/insertions in the case of ZFN-1 and -2 techniques up to targeted introduction of new genes in the case of the ZFN-3 technique): (1) ZFN-1: Genes encoding ZFNs are delivered to plant cells without a repair template. The ZFNs bind to the plant DNA and generate site specific double-strand breaks (DSBs). The natural DNA-repair process (which occurs through nonhomologous end-joining, NHEJ) leads to site specific mutations, in one or only a few base pairs, or to short deletions or insertions. (2) ZFN-2: Genes encoding ZFNs are delivered to plant cells along with a repair template homologous to the targeted area, spanning a few kilo base pairs. The ZFNs bind to the plant DNA and generate site-specific DSBs. Natural gene repair mechanisms generate site-specific point mutations e.g. changes to one or a few base pairs through homologous recombination and the copying of the repair template. (ZFN-3): Genes encoding ZFNs are delivered to plant cells along with a stretch of DNA which can be several kilo base pairs long and the ends of which are homologous to the DNA sequences flanking the cleavage site. As a result, the DNA stretch is inserted into the plant genome in a site specific manner. “Fokl” is a type IIs restriction endonuclease that includes a DNA recognition domain and a catalytic (endonuclease) domain. The fusion proteins described herein can include all of Fokl or just the catalytic endonuclease domain, e.g., amino acids 388-583 or 408-583 of GenBank Acc. No. AAA24927.1, e.g., as described in WO95/09233, Li et al., Nucleic Acids Res. 39(1): 359-372 (2011); Cathomen and Joung, Mol. Ther. 16: 1200-1207 (2008), or a mutated form of Fokl as described in Miller et al. Nat Biotechnol 25: 778-785 (2007); Szczepek et al., Nat Biotechnol 25: 786-793 (2007); or Bitinaite et al., Proc. Natl. Acad. Sci. USA. 95:10570-10575 (1998). See also Tsai et al., Nat Biotechnol. 2014 June; 32(6):569-76. In some embodiments, plants of interest are modified through Fokl endonucleases.

[0280] As used herein, the term “targeted base-editing system” refers to a protein, nucleic acid, or combination thereof that is capable of substituting a single nucleotide at a target site and modifying an endogenous target DNA sequence when introduced into a cell, thereby causing one or more amino acid substitutions. Numerous gene editing systems suitable for use in the methods of the present disclosure, include, but are not limited to, zinc-finger nuclease systems, TALEN systems, and CRISPR/Cas systems. In some embodiments, a nuclease-inactivated CRISPR/Cas system having a base deaminase activity is utilized for a targeted base-editing. In other aspects, a nickase is used.

[0281] In some embodiments, a “targeted base-editing system” of the invention can mediate a change in the sequence of the endogenous target gene, for example, by introducing one or more point mutations into the endogenous target sequence, such as by substituting C with T (or G with A) or A with G (or T with C) in the endogenous target sequence.

[0282] In some embodiments, the targeted base-editing system may mediate a change in the expression of the protein encoded by the endogenous target gene. In such embodiments, the targeted base-editing system may regulate the expression of the encoded protein by modifications of the endogenous target DNA sequence, or by acting on the mRNA product encoded by the DNA sequence. In some embodiments, the targeted base-editing system may result in the expression of a modified endogenous protein. In some embodiments, the modifications to the endogenous DNA sequence mediated by the targeted base-editing system result in an altered function of the modified endogenous protein as compared to the corresponding endogenous protein in an unmodified plant cell. In such embodiments, the expression level of the modified endogenous protein may be increased, decreased or may be the same, or substantially similar to, the expression level of the corresponding endogenous protein in an unmodified plant cell.

[0283] The present disclosure provides a targeted base-editing system to edit a target nucleotide sequence in the genome of a plant, comprising for example, one of the following i) a base editing fusion protein, and a guide nucleic acid; ii) an expression construct comprising a nucleotide sequence encoding a base editing fusion protein, and a guide nucleic acid; iii) a base editing fusion protein, and an expression construction comprising a nucleotide sequence encoding a guide nucleic acid; iv) an expression construct comprising a nucleotide sequence encoding a base editing fusion protein, and an expression construct comprising a nucleotide sequence encoding a guide nucleic acid; v) an expression construct comprising a nucleotide sequence encoding base editing fusion protein and a nucleotide sequence encoding guide nucleic acid; wherein the base editing fusion protein contains a CRISPR-Cas effector protein or domain thereof, and optionally a deaminase protein and/or domain, and the guide RNA can target said gene editing fusion protein to the target sequence in the plant genome. In some embodiments, a targeted base editing fusion protein comprises a nuclease-inactivated CRISPR-Cas effector domain and a cytidine deaminase domain. In some embodiments, a targeted base-editing fusion protein comprises a nuclease-inactivated CRISPR-Cas effector domain and an adenosine deaminase domain.

[0284] In some embodiments, the targeted gene-editing system described herein contains CRISPR (Clustered Regularly Interspaced Short Palindromic Repeats)/Cas (CRISPR Associated) nuclease system as a CRISPR-Cas effector domain. In some embodiments, the CRISPR/Cas system is a Class 2 system. Class 2 CRISPR/Cas systems are divided into three types: Type II, Type V, and Type VI systems. In some embodiments, the CRISPR/Cas system is a Class 2 Type II system, utilizing the Cas9 protein. In some embodiments, the site-directed modifying polypeptide is a Cas9 DNA endonuclease (or variant thereof).

[0285] In some embodiments, a CRISPR/Cas system is a Class 2 Type V system comprising Cas12 proteins (e.g., Cas12a (also known as Cpf1), Cas12b (also known as C2c1), Cas12c (also known as C2c3), Cas12d (also known as CasY), and Cas12e (also known as CasX)). In some embodiments, a site-directed modifying polypeptide is a Cas12 DNA endonuclease (or variant thereof). In some embodiments, a CRISPR/Cas system is a Class 2 and Type VI system, utilizing the Cas13 proteins (e.g., Cas13a (also known as C2c2), Cas13b, and Cas13c). (See, Pyzocha et al., ACS Chemical Biology, 13(2), 347-356). In some embodiments, a site-directed modifying polypeptide is a Cas13 RNA riboendonuclease.

[0286] A Cas polypeptide refers to a polypeptide that can interact with a guide molecule (e.g., gRNA, sgRNA) and, in concert with the guide molecule, home or localize to a target nucleic acid sequences (e.g., DNA target sequence or RNA target sequence). Cas polypeptides include naturally occurring Cas proteins and engineered, altered, or otherwise modified Cas proteins that differ by one or more amino acid residues from a naturally-occurring Cas sequence.

[0287] A guide RNA (gRNA) comprises two segments, a DNA-binding segment and a protein-binding segment. In some embodiments, the protein-binding segment of a gRNA is comprised in one RNA molecule and the DNA-binding segment is comprised in another separate RNA molecule. Such embodiments are referred to herein as “double-molecule gRNAs” or “two-molecule gRNA” or “dual gRNAs.” In some embodiments, the gRNA is a single RNA molecule and is referred to herein as a “single-guide RNA” or an “sgRNA.” The term “guide RNA” or “gRNA” is inclusive, referring both to two-molecule guide RNAs and sgRNAs. FIGS. 1-5 provide illustrations of spacer sequences from guide nucleic acids aligned with myrosinase gene sequences, AOP2 gene sequences and CYP79F1 gene sequences.

[0288] The protein-binding segment of a gRNA comprises, in part, two complementary stretches of nucleotides that hybridize to one another to form a double stranded RNA duplex (dsRNA duplex), which facilitates binding to the Cas protein. The nucleic acid-binding segment (or “nucleic acid-binding sequence”) of a gRNA comprises a nucleotide sequence that is complementary to and capable of binding to a specific target nucleic acid sequence. The protein-binding segment of the gRNA interacts with a Cas polypeptide and the interaction of the gRNA molecule and site-directed modifying polypeptide results in Cas binding to the endogenous nucleic acid sequence and produces one or more modifications within or around the target nucleic acid sequence. The precise location of the target modification site is determined by both (i) base-pairing complementarity between the gRNA and the target nucleic acid sequence; and (ii) the location of a short motif, referred to as the protospacer adjacent motif (PAM), in the target DNA sequence (referred to as a protospacer flanking sequence (PFS) in target RNA sequences). The PAM/PFS sequence is required for Cas binding to the target nucleic acid sequence. A variety of PAM/PFS sequences are known in the art and are suitable for use with a particular Cas endonuclease (e.g., a Cas9 endonuclease)(See e.g., Nat Methods. 2013 November; 10(11): 1116-1121 and Sci Rep. 2014; 4: 5405). In some embodiments, the PAM sequence is located within 50 base pairs of the target modification site in a target DNA sequence. In some embodiments, the PAM sequence is located within 10 base pairs of the target modification site in a target DNA sequence. The DNA sequences that can be targeted by this method are limited only by the relative distance of the PAM sequence to the target modification site and the presence of a unique 20 base pair sequence to mediate sequence-specific, gRNA-mediated Cas binding. In some embodiments, the PFS sequence is located at the 3′ end of the target RNA sequence. In some embodiments, the target modification site is located at the 5′ terminus of the target locus. In some embodiments, the target modification site is located at the 3′ end of the target locus. In some embodiments, the target modification site is located within an intron or an exon of the target locus.

[0289] In some embodiments, the present disclosure provides a polynucleotide encoding a gRNA. In some embodiments, a gRNA-encoding nucleic acid is comprised in an expression vector, e.g., a recombinant expression vector. In some embodiments, the present disclosure provides a polynucleotide encoding a site-directed modifying polypeptide. In some embodiments, the polynucleotide encoding a site-directed modifying polypeptide is comprised in an expression vector, e.g., a recombinant expression vector.

[0290] In some embodiments, the addition of a uracil DNA glycosylase (UGI) domain can further increased the base-editing efficiency. In some embodiments, a targeted base-editing system of the invention further comprises a base excision repair (BER) inhibitor. Cellular DNA-repair response to the presence of a U:G pairing in DNA may be responsible for a decrease in nucleobase editing efficiency in plant cells. Uracil DNA glycosylase catalyzes removal of uracil from DNA in plant cells, which may initiate base excision repair, such that the U:G pair is reversed to C:G. In some embodiments, the BER inhibitor is an uracyl glycosylase inhibitor or an active domain thereof.

[0291] In some embodiments, the BER inhibitor is an inhibitor of uracil DNA glycosylase (UDG). In some embodiments, the BER inhibitor is an inhibitor of UDG. In some embodiments, the BER inhibitor is a polypeptide inhibitor. In some embodiments, the BER inhibitor is a protein that binds single-stranded DNA. For example, the BER inhibitor may be a Erwinia tasmaniensis single-stranded binding protein. In some embodiments, the BER inhibitor is a protein that binds uracil. In some embodiments, the BER inhibitor is a protein that binds uracil in DNA. In some embodiments, the BER inhibitor is a catalytically inactive UDG or binding domain thereof. In some embodiments, the BER inhibitor is a catalytically inactive UDG or binding domain thereof that does not excise uracil from the DNA. Other proteins that are capable of inhibiting (e.g., sterically blocking) UDG are within the scope of this disclosure. Additionally, any proteins that block or inhibit base-excision repair as also within the scope of this disclosure.

[0292] Base excision repair may be inhibited by molecules that bind the edited strand, block the edited base, inhibit uracil DNA glycosylase, inhibit base excision repair, protect the edited base, and/or promote fixing of the non-targeted strand. Accordingly, the use of the BER inhibitor described herein can increase the editing efficiency of a cytidine deaminase that is capable of catalyzing a C to U change.

[0293] In some embodiments, a base editing system of the invention can comprise the following domains; i) the CRISPR-Cas protein (dCas9 or nCas9) and ii) the cytidine deaminase, which can be fused to or linked to a BER inhibitor (e.g., an inhibitor of uracil DNA glycosylase).

[0294] “Uracil-DNA glycosylase” (UDG) is an enzyme that reverts mutations in DNA. The most common mutation is the deamination of cytosine to uracil. UDG repairs these mutations and UDG is crucial in DNA repair. Various uracil-DNA glycosylases and related DNA glycosylases (EC) are present such as uracil-DNA glycosylase, thermophilic uracil-DNA glycosylase, G:T/U mismatch-specific DNA glycosylase (Mug), and single-strand selective monofunctional uracil-DNA glycosylase (SMUG1).

[0295] Uracil DNA glycosylases remove uracil from DNA, which can arise either by spontaneous deamination of cytosine or by the misincorporation of dU opposite dA during DNA replication. The prototypical member of this family is E. coli UDG, which was among the first glycosylases discovered. Four different uracil-DNA glycosylase activities have been identified in mammalian cells, including UNG, SMUG1, TDG, and MBD4, which vary in substrate specificity and subcellular localization. SMUG1 prefers single-stranded DNA as substrate, but also removes U from double-stranded DNA. In addition to unmodified uracil, SMUG1 can excise 5-hydroxyuracil, 5-hydroxymethyluracil and 5-formyluracil bearing an oxidized group at ring C5.[13] TDG and MBD4 are strictly specific for double-stranded DNA. TDG can remove thymine glycol when present opposite guanine, as well as derivatives of U with modifications at carbon 5.

[0296] TDG and SMUG1 are the major enzymes responsible for the repair of the U:G mispairs caused by spontaneous cytosine deamination, whereas uracil arising in DNA through dU misincorporation is mainly dealt with by UNG. MBD4 is thought to correct T:G mismatches that arise from deamination of 5-methylcytosine to thymine in CpG sites.

[0297] Uracil arising in DNA either from misincorporation of dUMP or from deamination of cytosine is actively removed through the multistep base excision repair (BER) pathway. BER of uracil is initiated by a uracil DNA glycosylase (UDG) activity that cleaves the N-glycosidic bond and excises uracil as a free base, generating an abasic (apurinic/apyrimidinic, AP) site in the DNA. Repair is completed through subsequent steps that include incision at the AP site, gap tailoring, repair synthesis, and ligation.

[0298] In some embodiments, the addition of a Uracil-DNA glycosylase (UDG) such as uracil N-glycosylase (UNG) can induce various mutations at targeted base. In some embodiments, the targeted base-editing system further comprises a Uracil-DNA glycosylase (UDG). Cellular DNA-repair response to the presence of a U:G pairing in DNA may be responsible for a decrease in nucleobase editing efficiency in plant cells. Uracil DNA glycosylase catalyzes removal of uracil from DNA in plant cells, which may initiate base excision repair, such that the U:G pair is reversed to C:G. In some embodiments, removal of uracil from DNA in plant cells are not always reversed to C for C:G paring, but randomized to other bases such as T, A, and G.

[0299] In some embodiments, a Uracil-DNA glycosylase (UDG) may be fused to the targeted base editing system of this invention to introduce a stable and targeted, but randomized single nucleotide substitution in a target gene of interest such as a gene encoding an enzyme involved in glucosinolate biosynthesis or breakdown (e.g., myrosinase, CYP79F1 and AOP2).

[0300] The use of the UDG described herein can increase the base randomization in a targeted single nucleotide of a target gene, for example, a gene encoding an enzyme involved in glucosinolate biosynthesis or breakdown (e.g., myrosinase, CYP79F1 and AOP2).

[0301] In some embodiments, a UDG is provided in cis. In some embodiments, a UDG is provided in trans. In some embodiments, a UDG is fused to a base editor (or a base editing system) described in the present disclosure. lo other embodiments, a UDG trigger a stall DNA replication for base randomization. In other embodiments, a UDG triggers a DNA repair through DNA replication, thereby including base randomization. In further embodiments, naturally occurring UDG variants can be used as a UDG domain. In further embodiments, non-naturally occurring UDG variants can be used as a UDG domain. In further embodiments, a UDG can be genetically engineered to enhance a functional UDG activity.

[0302] A “nuclear localization signal” (NLS), or any other organelle targeting signal, can be further required to ensure proper targeting of the complex. The present disclosure relate to modifying a cytosine in a target locus of interest, whereby the target locus is within a plant cell. In order to improve targeting of the CRISPR-Cas protein and/or the cytidine deaminase protein or catalytic domain thereof used in the methods of the present disclosure to the nucleus, it may be advantageous to provide one or both of these components with one or more nuclear localization sequences (NLSs).

[0303] In some embodiments, the NLSs can be heterologous to the proteins to be located to the nuclease. In general, NLS consists of one or more short sequences of positively charged lysine or arginine exposed on the surface of a protein, but other types of NLS are also known in the art. In some embodiments, the N-terminus of the gene editing fusion protein comprises an NLS with an amino acid sequence. In some embodiments, the C-terminus of the gene-editing fusion protein comprises an NLS.

[0304] A base editing fusion protein may also include other localization sequences, such as cytoplasmic localization sequences, chloroplast localization sequences, mitochondrial localization sequences, and the like, depending on the location of the DNA to be edited. In order to obtain efficient expression in plants, in some embodiments, the nucleotide sequence encoding the base editing fusion protein is codon optimized for the plant to be base edited.

[0305] Codon optimization refers to a process of modifying a nucleic acid sequence for enhanced expression in the host cells of interest by replacing at least one codon (e.g. about or more than about 1, 2, 3, 4, 5, 10, 15, 20, 25, 50, or more codons) of the native sequence with codons that are more frequently or most frequently used in the genes of that host cell while maintaining the native amino acid sequence. Various species exhibit particular bias for certain codons of a particular amino acid. Codon bias (differences in codon usage between organisms) often correlates with the efficiency of translation of messenger RNA (mRNA), which is in turn believed to be dependent on, among other things, the properties of the codons being translated and the availability of particular transfer RNA (tRNA) molecules. The predominance of selected tRNAs in a cell is generally a reflection of the codons used most frequently in peptide synthesis. Accordingly, genes can be tailored for optimal gene expression in a given organism based on codon optimization. Codon usage tables are readily available, for example, at the “Codon Usage Database” available at www.kazusa.orjp/codon/ and these tables can be adapted in a number of ways. See Nakamura, Y., et al. “Codon usage tabulated from the international DNA sequence databases: status for the year 2000” Nucl. Acids Res. 28:292 (2000).

[0306] In some embodiments, a codon-optimized nucleotide sequence encoding the base editing fusion protein is provided herein. In some embodiments, the guide RNA is a single guide RNA (sgRNA). Methods of constructing suitable sgRNAs according to a given target sequence are known in the art. See e.g., Wang, Y. et al. Nat. Biotechnol. 32, 947-951 (2014); Shan, Q. et al. Nat. Biotechnol. 31, 686-688 (2013); Liang, Z. et al. J Genet Genomics. 41, 63-68 (2014).

[0307] Any plant or plant part comprising a glucosinolate pathway comprising one or more of a myrosinase, a CYP79F1 or an AOP2 may be useful with this invention. In some embodiments, a plant or plant part useful with the invention may be in the order Brassicales. In some embodiments, a plants useful with the invention may be in the Brassicaceae family, in the Moringaceae family (e.g., Moringa spp.) and/or in the Caricaceae family (e.g., C. papaya). In some embodiments, the plants are species within the genus Brassica including, but are not limited to, B. balearica (Mallorca cabbage), B. carinata (Abyssinian mustard or Abyssinian cabbage, used to produce biodiesel), B. elongata (elongated mustard), B. fruticulosa (Mediterranean cabbage), B. hilarionis (St Hilarion cabbage), B. juncea (Indian mustard, brown and leaf mustards, Sarepta mustard), B. napus (rapeseed, canola, rutabaga, Siberian kale (swede, swede turnip, Swedish turnip)), B. narinosa (broadbeaked mustard), B. nigra (black mustard), B. oleracea (kale, cabbage, collard greens, broccoli, cauliflower, kailan, Brussels sprouts, kohlrabi), B. perviridis (tender green, mustard spinach), B. rapa (syn. B. campestris) (Chinese cabbage, turnip, rapini, komatsuna), B. rupestris (brown mustard), and B. toumefortii (Asian mustard).

[0308] In some embodiments, a plant or plant part is a mustard plant. Example mustard plants (or parts there of) include, but are not limited to, a kale plant or part thereof, a collard plant or part thereof, a spinach plant or part thereof, a cabbage plant or part thereof, a beet plant or part thereof, a watercress plant or part thereof, a lettuce plant or part thereof (e.g. romaine), a swiss chard plant or part thereof, an arugula plant or part thereof, an endive plant or part thereof, a bok choy plant or part thereof, a rutabaga plant or part thereof, a turnip plant or part thereof, a mustard plant or part thereof, a cabbage plant or part thereof, a broccoli plant or part thereof, a cauliflower plant or part thereof, a Brussels sprout plant or part thereof, a radish plant or part thereof, or a kohlrabi plant or part thereof. In some embodiments, a mustard plant or part thereof may include, but is not limited to, Brassica oleracea (e.g., B. oleracea var. oleracea, B. oleracea var. capitata, B. oleracea var. botrytis, B. oleracea var. gemmifera, B. oleracea var. sabauda, B. oleracea var. gongyiodes, B. oleracea var. italic, B. oleracea var. sabellica, B. oleracea var. acephala), Brassica juncea, Brassica rapa (B. rapa subsp. pekinensis, B. rapa subsp. Chinensis, B. rapa subsp. rapa), Brassica napas, Brassica carinata, Brassica campestris Brassica nigra or Raphanus raphanistrum (e.g., Raphanus raphanistrum subsp. Sativus).

[0309] The methods for targeted gene-editing system as described herein can be used to confer desired traits on essentially any plant. A wide variety of plants and plant cell systems may be engineered for the desired physiological and agronomic characteristics described herein using the nucleic acid constructs of the present disclosure and the various transformation methods. In preferred embodiments, target plants and plant cells for gene editing include, but are not limited to, Brassicaceae plants including, but are not limited to, B. balearica (Mallorca cabbage), B. carinata (Abyssinian mustard or Abyssinian cabbage, used to produce biodiesel), B. elongata (elongated mustard), B. fruticulosa (Mediterranean cabbage), B. hilarionis (St Hilarion cabbage), B. juncea (Indian mustard, brown and leaf mustards, Sarepta mustard), B. napus (rapeseed, canola, rutabaga, Siberian kale (swede, swede turnip, Swedish turnip)), B. narinosa (broadbeaked mustard), B. juncea, B. rapa B. nigra (black mustard), B. oleracea (kale, cabbage, collard greens, broccoli, cauliflower, kailan, Brussels sprouts, kohlrabi), B. perviridis (tender green, mustard spinach), B. carinata, B. campestris, B. rapa (syn. B. campestris) (Chinese cabbage, turnip, rapini, komatsuna), B. rupestris (brown mustard), and B. tournefortii (Asian mustard) or Raphanus raphanistrum.

[0310] The present disclosure provides methods for targeted editing in a plant cell, tissue, organ or plant. In one aspect, the present disclosure provides methods for producing a gene-edited plant by transient expression of a gene editing system. The present disclosure teaches a gene-edited plants that is also transgene-free without any integration of foreign DNAs.

[0311] The present invention also provides a method of producing gene edited plants by a DNA-free delivery using RNP-mediated transfection of editing tools and regeneration of protoplasts.

[0312] In some embodiments, the targeted gene-editing system as described herein is used to introduce targeted mutations, such as insertions, deletions, or substitutions, thereby causing a nonsense mutation (e.g., premature stop codon) or a missense mutation (e.g., encoding different amino acid residue). This is of interest where the single nucleotide mutations in certain endogenous genes can confer or contribute to a desired trait.

[0313] The methods described herein result in the generation of gene-edited plants that have one or more desirable traits compared to the wild type plant.

[0314] In some embodiments, non-transgenic gene-edited plants, plant parts, or cells are obtained, in that no exogenous DNA sequence is incorporated into the genome of any of the plant cells of the plant. In such embodiments, the gene-edited plants are non-transgenic. Where only the modification of an endogenous gene is ensured and no foreign genes are introduced or maintained in the plant genome, the resulting genetically modified crops contain no foreign genes and can thus basically be considered non-transgenic.

[0315] In some embodiments, modification of the target sequence can be accomplished simply by introducing or producing the base editing fusion protein and guide nucleic in plant cells, and the modification can be stably inherited without the need of stably transformation of plants with the base editing system.

[0316] In some embodiments, the polynucleotides are delivered into the cell by a DNA virus (e.g., a geminivirus) or an RNA virus (e.g., a tobravirus). In other embodiments, the introducing steps include delivering to the plant cell a T-DNA containing one or more polynucleotide sequences encoding the CRISPR-Cas protein, the cytidine deaminase and the guide nucleic acid, where the delivering is via Agrobacterium. The polynucleotide sequence encoding the components of the cytidine deaminase coupled CRISPR/Cas system can be operably linked to a promoter, such as a constitutive promoter (e.g., a cauliflower mosaic virus 35S promoter), or a cell specific or inducible promoter in a plant cell of interest described herein. In other embodiments, the polynucleotide is introduced by microprojectile bombardment.

[0317] In some embodiments, introduction of a nucleic acid may be performed in the absence of a selective pressure, thereby avoiding the integration of exogenous nucleotide sequences in the plant genome. In some embodiments, the introduction comprises transforming the base editing system into isolated plant cells or tissues, and then regenerating the transformed plant cells or tissues into an intact plant. Preferably, the regeneration is performed in the absence of a selective pressure, i.e., no selective agent against the selective gene carried on the expression vector is used during the tissue culture. Without the use of a selective agent, the regeneration efficiency of the plant can be increased to obtain a modified plant that does not contain exogenous nucleotide sequences.

[0318] In some embodiments, a base editing system can be introduced into plants by any methods known in the art or later developed, including but not limited to particle bombardment, PEG-mediated protoplast transformation, Agrobacterium-mediated transformation, plant virus-mediated transformation, pollen tube, and ovary injection.

[0319] In some embodiments, the gene editing system of the present disclosure can be transformed to a particular site on an intact plant, such as leaf, shoot tip, pollen tube, young ear, or hypocotyl. This is particularly suitable for the transformation of plants that are difficult to regenerate by tissue culture. In some embodiments, proteins expressed in vitro and/or RNA molecules transcribed in vitro are directly transformed into the plant. The proteins and/or RNA molecules are capable of achieving gene-editing in plant cells, and are subsequently degraded by the cells to avoid the integration of exogenous nucleotide sequences into the plant genome.

[0320] In some embodiments, the target sequence is associated with plant traits such as desired traits, and thereby the gene editing results in the plant having altered traits relative to a wild type plant. In the present disclosure, the target sequence to be modified may be located anywhere in the genome, for example, within a functional gene such as a protein-coding gene or, for example, may be located in a gene expression regulatory region such as a promoter region or an enhancer region, and thereby accomplish the functional modification of said gene or accomplish the modification of a gene expression.

[0321] In some embodiments, the method further comprises obtaining progeny of the gene-edited plant, which may also be non-transgenic. In a further aspect, the disclosure also provides a gene-edited plant or progeny thereof or parts thereof, wherein the plant is obtained by the method described above.

[0322] In some aspects, the present disclosure also provides a plant breeding method comprising crossing a first gene-edited plant obtained by the above-mentioned method of the present disclosure with a second plant not containing said genetic modification, thereby introducing said genetic modification into said second plant. In some embodiments, a first non-transgenic plant comprising a first edited gene as described herein and a second non-transgenic plant comprising a second edited gene as described herein may be crossed with one another, wherein the progeny comprising are selected that comprise both the first and the second edited gene. Thus, for example, a first non-transgenic plant comprising a non-natural mutation in a myrosinase gene (one or more myrosinase genes) may be crossed with a second non-transgenic plant comprising a non-natural mutation in an AOP2 gene (one or more AOP2 genes) and/or a CYP79F1 gene (one or more CYP79F1 genes) and the progeny comprising both the non-natural mutation in the myrosinase gene and the AOP2 gene and/or CYP79F1 gene are selected.

[0323] In some embodiments, the methods can include a step of regenerating a plant from the plant cell. In further embodiments, the methods include cross breeding the plant to obtain a genetically desired plant lineage. As an example, a plant of the invention may be cross bred with another plant of the present invention to provide a progeny plant comprising a non-natural mutation in one or more myrosinase genes, one or more CYP79F1 genes and/or one or more AOP2 genes. As one of skill in the art would understand plants comprising other desirable genes may be crossed into plants of this invention.

[0324] The present invention is directed to methods and compositions for producing a plant or part thereof (e.g., a Brassicales plant or part thereof) having reduced pungency and/or bitterness in flavor and/or odor. In some embodiments, the present invention provides methods and compositions for producing a mustard plant having reduced pungency and/or bitterness in flavor and/or odor. Accordingly, the present invention provides a mustard plant (e.g., Brassicaceae, e.g., Brassica spp), a plant in the Moringaceae family and/or a plant in the Caricaceae family, or part thereof, comprising at least one non-natural mutation in an endogenous gene encoding a cytochrome P450 mono-oxygenase (i.e., CYP79F1, homomethionine N-monooxygenase; EC 1.14.14.42), an endogenous gene encoding a 2-oxo acid-dependent dioxygenase (i.e., AOP2, 2-oxoglutarate-dependent dioxygenase; EC 1.14.11.M8) and/or an endogenous gene encoding a myrosinase (i.e., glucosinolase, thioglucosidase (e.g., β-thioglucosidase), thioglucoside glucohydrolase; EC 3.2.1.147 (EC 3.2.3.1 transferred to 3.2.1.147)). In some embodiments, the mustard plant or part thereof comprising at least one non-natural mutation in an endogenous gene exhibits a reduction in activity, e.g., the endogenous gene encoding a CYP79F1, the endogenous gene encoding the AOP2, and/or the endogenous gene encoding the myrosinase is reduced in transcription activity or translation activity (e.g., a reduced amount of protein produced (e.g., reduced by about 5, 10, 15, 20, 25, 30, 35, 40, 45, 50 55, 60, 65, 70, 75, 80, 85, 90, 95, or 100%) and/or the protein produced by the endogenous gene is reduced in activity (e.g., reduced by about 5, 10, 15, 20, 25, 30, 35, 40, 45, 50 55, 60, 65, 70, 75, 80, 85, 90, 95, or 100% in activity)).

[0325] In some embodiments, a mustard plant or part thereof comprising at least one non-natural mutation in an endogenous gene exhibits reduced hydrolysis of glucosinolates and reduced pungency and/or reduced bitterness in taste and aroma as compared to a plant (or part thereof) when grown under the same environmental conditions. In some embodiments, a mustard plant or part thereof comprising at least one non-natural mutation in an endogenous gene encoding myrosinase exhibits reduced hydrolysis of glucosinolates. As used herein “reduced hydrolysis of glucosinolates” refers to reduced production of thiocyanates or reduced amounts of thiocyanates, optionally wherein the isothiocyanate is allyl isothiocyanate, and/or refers to reduced hydrolysis of sinigrin (i.e., allylglucosinolate or 2-propenylglucosinolate)) and results in reduced production of glucose.

[0326] In some embodiments, a mustard plant or part thereof comprising at least one non-natural mutation in an endogenous gene exhibits reduced amounts or reduced production of alkenyl glucosinolates, wherein the mustard plant or part thereof exhibits reduced pungency and/or reduced bitterness in taste and aroma as compared to a plant when grown under the same environmental conditions. In some embodiments, a mustard plant or part thereof comprising at least one non-natural mutation in an endogenous gene encoding an AOP2 exhibits reduced amounts or reduced production of alkenyl glucosinolates as compared to a plant (or part thereof) when grown under the same environmental conditions.

[0327] In some embodiments, a mustard plant or part thereof comprising at least one non-natural mutation in an endogenous gene exhibits reduced amounts/production of aliphatic glucosinolates, wherein the mustard plant or part thereof exhibits reduced pungency and/or reduced bitterness in taste and aroma as compared to a plant (or part thereof) when grown under the same environmental conditions. In some embodiments, a mustard plant or part thereof comprising at least one non-natural mutation in an endogenous gene encoding a CYP79F1 exhibits reduced amounts or reduced production of alkenyl glucosinolates as compared to a plant (or part thereof) when grown under the same environmental conditions.

[0328] In some embodiments, a mustard plant of this invention exhibits reduced pungency as compared to a plant not comprising the same mutation and grown under the same environmental conditions. In some embodiments, a mustard plant of the invention exhibits reduced bitterness as compared to a plant not comprising the same mutation when grown under the same environmental conditions. In some embodiments, a mustard plant of the invention exhibits reduced pungency and reduced bitterness. In some embodiments, a mustard plant of the invention comprises a mutation in at least one myrosinase gene and exhibits reduced bitterness. In some embodiments, a mustard plant of the invention comprises a mutation in at least one AOP2 gene and exhibits reduced pungency and reduced bitterness as compared to a plant not comprising the same mutation and grown under the same environmental conditions. In some embodiments, a mustard plant of the invention comprises a mutation in at least one CYP79F1 gene and exhibits reduced pungency and reduced bitterness as compared to a plant not comprising the same mutation and grown under the same environmental conditions.

[0329] The present invention further provides a mustard plant or part thereof (e.g., a plant cell) having reduced pungency or bitterness in flavor or aroma (e.g., reduced hydrolysis of glucosinolates and/or reduced amounts/production of alkenyl glucosinolates and/or aliphatic glucosinolates) (compared to a plant not comprising the same mutation and grown under the same environmental conditions) comprising at least one non-natural mutation an endogenous myrosinase gene, an endogenous AOP2 gene and/or an endogenous CYP79F1 gene, wherein the at least one mutation is a substitution, insertion or a deletion that is introduced using an editing system that comprises a nucleic acid binding domain that binds to a target site in the endogenous myrosinase gene, in the endogenous AOP2 gene or in the endogenous CYP79F1 gene.

[0330] Accordingly, in some embodiments, a mustard plant of this invention exhibits reduced pungency. In some embodiments, a mustard plant of the invention exhibits reduced bitterness. In some embodiments, a mustard plant of the invention exhibits reduced pungency and reduced bitterness. In some embodiments, a mustard plant of the invention comprises a mutation in at least one myrosinase gene and exhibits reduced bitterness. In some embodiments, a mustard plant of the invention comprises a mutation in at least one AOP2 gene and exhibits reduced pungency and reduced bitterness. In some embodiments, a mustard plant of the invention comprises a mutation in at least one CYP79F1 gene and exhibits reduced pungency and reduced bitterness. Reduced pungency and reduced bitterness is as compared to a control plant that does not comprise the same mutation and is grown under the same environmental conditions.

[0331] In some embodiments, the at least one non-natural mutation is a dominant-negative allele, semi-dominant allele, weak loss of function allele, null allele, a hypermorphic mutation or a hypomorphic mutation. In some embodiments, the at least one non-natural mutation is a null allele. In some embodiments, the null allele is a full knockout mutant CYP79F1 allele, a full knockout mutant AOP2 allele and/or a full knockout mutant myrosinase allele. As used herein, a “full knockout mutant allele” results in the production of a nonfunctional protein or no production of the protein encoded by the at least one non-natural mutation, e.g., production of a nonfunctional CYP79F1 protein or no production of the CYP79F1, production of a nonfunctional AOP2 protein or no production of a AOP2 protein, and/or production of a nonfunctional myrosinase protein or no production of a myrosinase protein.

[0332] The mutation in a myrosinase gene, an AOP2 gene, or a CYP79F1 gene of a mustard plant or part thereof (including, e.g., a plant cell) may be any type of mutation, including a base substitution, a deletion and/or an insertion. In some embodiments, a non-natural mutation is a point mutation. In some embodiments, a non-natural mutation may be a substitution of at least one base pair, a deletion of at least one base pair, or an insertion of at least one base pair. In some embodiments, a non-natural mutation may comprise a base substitution to an A, a T, a G, or a C. In some embodiments, a base substitution may produce a premature stop codon, thereby producing no protein or a truncated protein, optionally wherein the truncated protein is non-functional. In some embodiments, a deletion of a base may result in an in-frame or out of frame mutation, optionally wherein the in-frame or out of frame mutation results in a premature stop codon. In some embodiments, a mutation in a gene that results in a premature stop codon produces no polypeptide or a produces a non-functional polypeptide, optionally wherein the non-functional polypeptide is a truncated polypeptide.

[0333] In some embodiments, a mutation may comprise a deletion of at least 1 base pair to about 1000, 1500, 2000, or 2500 base pairs or more of a myrosinase gene (e.g., 1, 3, 6, 9, 15, 20, 30, 40, 50, 100, 150, 200, 300, 400, or 500 base pairs to about 600, 700, 800, 900, 1000, 1500, 2000 or 2500 base pairs or more, or any range or value therein, optionally wherein the deleted base pairs are consecutive base pairs). In some embodiments, the deletion in a myrosinase gene may result in an in-frame or out of frame mutation, optionally wherein the in-frame or out of frame mutation results in a premature stop codon. In some embodiments, the deletion may be a deletion of the full length of the myrosinase gene. In some embodiments, the deletion is in the 5′ end of the myrosinase gene. In some embodiments, a deletion useful with this invention may result in the production of no myrosinase protein by the gene comprising the deletion or may result in a truncated myrosinase protein that is non-functional (e.g., a null mutation or null allele), optionally wherein the truncation of the protein comprises a truncation of at least about 50 to about 300 consecutive amino acid residues or more from the C-terminal end of the protein (e.g., the C-terminal amino acid residue of the polypeptide through to about 50 to about 300 consecutive amino acid residues) (e.g., about 50, 55, 60, 65, 70, 75, 80, 85, 90, 95, 100, 120, 140, 160, 180, 200, 220, 240, 260, 280, 300 or more consecutive amino acid residues). A plant useful with this invention may comprise multiple loci encoding myrosinase polypeptides. In some embodiments, one or two or more of the multiple loci (e.g., 2, 3, 4, 5, 6, 7, 8, 9, 10, 11, 12, 13, or more) or all loci may be edited to comprise a non-natural mutation as described herein.

[0334] In some embodiments, a non-natural mutation comprising a base substitution in a myrosinase gene may produce a premature stop codon, wherein the premature stop codon results in production of no myrosinase protein or a truncated myrosinase protein (e.g., a null mutation or null allele) by the mutated myrosinase gene, optionally wherein the truncated myrosinase protein is non-functional. In some embodiments, a truncated myrosinase polypeptide resulting from a base substitution in the myrosinase gene comprises a truncation of at least about 50 to about 300 consecutive amino acid residues or more from the C-terminal end of the protein (e.g., the C-terminal amino acid residue of the polypeptide through to about 50 to about 300 consecutive amino acid residues) (e.g., about 50, 55, 60, 65, 70, 75, 80, 85, 90, 95, 100, 120, 140, 160, 180, 200, 220, 240, 260, 280, 300 or more consecutive amino acid residues).

[0335] In some embodiments, at least one non-natural mutation in a myrosinase gene (e.g., a deletion of three or more consecution base pairs or a substitution of one or more base pairs) results in a deletion of at least one amino acid residue from the myrosinase polypeptide produced from the mutated myrosinase gene (e.g., at least 1, 2, 3, 4, 5, 6, 7, 8, 9, 10, 20, 30, 40, 50, 60, 70, 80, 90, 100, 110, 120, 130, 140, 150, 160, 170, 180, 190, 200, 220, 250, 300, 320, 350, 360, 370, 380, 390, 400, 410, 420, 440,445, 450, 451, 452, 453, 454, 455, 456, 457, 458, 459, or 460 amino acids, or any range or value therein). In some embodiments, the deletion in the myrosinase gene results in a deletion of two or more consecutive amino acid residues from the myrosinase polypeptide.

[0336] In some embodiments, a plant may comprise one or more (e.g., 1, 2, 3, 4, 5, 6, 7, 8, 9, 10, 11, 12, 13, or more), or two or more endogenous myrosinase genes (e.g., 2, 3, 4, 5, 6, 7, 8, 9, 10, 11, 12, 13, or more). In some embodiments, a plant or part thereof of this invention comprising one or more endogenous myrosinase genes may comprise a non-natural mutation in at least one endogenous myrosinase gene, wherein the mutation results in the production of a reduced amount of myrosinase or no myrosinase and a plant or part thereof having reduced pungency. In some embodiments, a plant or part thereof of this invention comprising one or more endogenous myrosinase genes may comprise a non-natural mutation one endogenous myrosinase gene, wherein the mutation results in the production of a reduced amount of myrosinase or no myrosinase and a plant or part thereof having reduced pungency. In some embodiments, a plant or part thereof of this invention may comprise a non-natural mutation in two endogenous myrosinase genes, wherein the mutation in the two genes results in the production of a reduced amount of myrosinase or no myrosinase, and a plant or part thereof having reduced pungency. In some embodiments, a plant or part thereof of this invention may comprise a non-natural mutation in three endogenous myrosinase genes, wherein the mutation in the three genes results in the production of a reduced amount of myrosinase or no myrosinase, and a plant or part thereof having reduced pungency. In some embodiments, a plant or part thereof of this invention may comprise a non-natural mutation in four endogenous myrosinase genes, wherein the mutation in the four genes results in the production of a reduced amount of myrosinase or no myrosinase, and a plant or part thereof having reduced pungency. In some embodiments, a plant or part thereof of this invention may comprise a non-natural mutation in five endogenous myrosinase genes, wherein the mutation in the five genes results in the production of a reduced amount of myrosinase or no myrosinase, and a plant or part thereof having reduced pungency. In some embodiments, a plant or part thereof of this invention may comprise a non-natural mutation in six endogenous myrosinase genes, wherein the mutation in the six genes results in the production of a reduced amount of myrosinase or no myrosinase, and a plant or part thereof having reduced pungency. In some embodiments, a plant or part thereof of this invention may comprise a non-natural mutation in 7, 8, 9, 10, 11, 12 or 13 or more endogenous myrosinase genes, wherein the mutation in each of the 7, 8, 9, 10, 11, 12 or 13 or more genes results in the production of a reduced amount of myrosinase or no myrosinase, and a plant or part thereof having reduced pungency. A reduction in pungency is as compared to a control plant that does not comprise the same mutation and is grown under the same environmental conditions.

[0337] In some embodiments, an endogenous gene encoding myrosinase comprises a nucleotide sequence having at least 80% sequence identity (e.g., about 80, 81, 82, 83, 84, 85, 86, 87, 88, 89, 90, 91, 92, 93, 94, 95, 96, 97 98, 99, or 100%) to any one of the nucleotide sequence of SEQ ID NOs:66-92, 680-721; or encodes a polypeptide comprising at least 80% sequence identity to any one of the amino acid sequences of SEQ ID NOs:93-105, 617-658, or 743-775.

[0338] In some embodiments, a mutation may comprise a deletion of at least 1 base pair to about 1000, 1500, 1750, 2000, 2500, 3000, 3500, 4000, 4500, 5000, or 5600 base pairs or more of an AOP2 gene (e.g., 1, 3, 6, 9, 15, 20, 30, 40, 50, 100, 150, 200, 300, 400, 500, 600, 700, 800, 900 base pairs to about 1000, 1500, 2000, 2500, 3000, 3500, 4000, 4500, 5000, or 5600 base pairs or any range or value therein, optionally wherein the deleted base pairs are consecutive base pairs). In some embodiments, the deletion in an AOP2 gene may result in an in-frame or out of frame mutation, optionally wherein the in-frame or out of frame mutation results in a premature stop codon. In some embodiments, the deletion may be a deletion of the full length of the AOP2 gene. In some embodiments, the deletion is in the 5′ end of the AOP2 gene. In some embodiments, a deletion useful with this invention may result in the production of no AOP2 protein by the gene comprising the deletion or may result in a truncated AOP2 protein that is non-functional (e.g., a null mutation or null allele), optionally wherein the truncation of the protein comprises a truncation of at least about 50 to about 300 consecutive amino acid residues or more from the C-terminal end of the protein (e.g., the C-terminal amino acid residue of the polypeptide through to about 50 to about 300 consecutive amino acid residues) (e.g., about 50, 55, 60, 65, 70, 75, 80, 85, 90, 95, 100, 120, 140, 160, 180, 200, 220, 240, 260, 280, 300 or more consecutive amino acid residues, or any range or value therein).

[0339] In some embodiments, a non-natural mutation comprising a base substitution in an AOP2 gene may produce a premature stop codon, wherein the premature stop codon results in production of no AOP2 protein or a truncated AOP2 protein (e.g., a null mutation or null allele) by the mutated AOP2 gene, optionally wherein the truncated AOP2 protein is non-functional. In some embodiments, a truncated AOP2 polypeptide resulting from a base substitution in the AOP2 gene comprises a truncation of at least about 50 to about 300 consecutive amino acid residues or more from the C-terminal end of the protein (e.g., the C-terminal amino acid residue of the polypeptide through to about 50 to about 300 consecutive amino acid residues) (e.g., about 50, 55, 60, 65, 70, 75, 80, 85, 90, 95, 100, 120, 140, 160, 180, 200, 220, 240, 260, 280, 300 or more consecutive amino acid residues).

[0340] In some embodiments, at least one non-natural mutation in an AOP2 gene (e.g., a deletion of three or more consecution base pairs or a substitution of one or more base pairs) results in a deletion of at least one amino acid residue from the AOP2 polypeptide produced from the mutated myrosinase gene (e.g., 1, 2, 3, 4, 5, 6, 7, 8, 9, 10, 20, 30, 40, 50, 60, 70, 80, 90, 100, 110, 120, 130, 140, 150, 160, 170, 180, 190, 200, 220, 250, 300, 320, 350, 360, 370, 380, 390, 400, 410, 420, 425, 430, 431, 432, 433, 434, 435, 436, 437, 438, or 439 amino acids, or any range or value therein). In some embodiments, the deletion in the AOP2 gene results in a deletion of two or more consecutive amino acid residues from the AOP2 polypeptide.

[0341] In some embodiments, an endogenous gene encoding AOP2 comprises a nucleotide sequence having at least 80% sequence identity (e.g., 80, 81, 82, 83, 84, 85, 86, 87, 88, 89, 90, 91, 92, 93, 94, 95, 96, 97 98, 99, or 100%) to any one of the nucleotide sequence of SEQ ID NOs:118-127 or 722-736; or encodes a polypeptide comprising at least 80% sequence identity to any one of the amino acid sequences of SEQ ID NOs:128-132, 659-673 or 776-781.

[0342] In some embodiments, a mutation may comprise a deletion of at least 1 base pair to about 1000, 1500, 2000, or 2100 base pairs or more of a CYP79F1 gene (e.g., 1, 3, 6, 9, 15, 20, 30, 40, 50, 100, 150, 200, 300, 400, 500, 600, 700, 800, 900 base pairs to about 1000, 1200, 1400, 1600, 1800, 1900, 2000 or 2100 base pairs or more, or any range or value therein, optionally wherein the deleted base pairs are consecutive base pairs). In some embodiments, the deletion in a CYP79F1 gene may result in an in-frame or out of frame mutation, optionally wherein the in-frame or out of frame mutation results in a premature stop codon. In some embodiments, the deletion may be a deletion of the full length of the CYP79F1 gene. In some embodiments, the deletion is in the 5′ end of the CYP79F1 gene. In some embodiments, a deletion useful with this invention may result in the production of no CYP79F1 protein by the gene comprising the deletion or may result in a truncated CYP79F1 protein that is non-functional (e.g., a null mutation or null allele), optionally wherein the truncation of the protein comprises a truncation of at least about 50 to about 350 consecutive amino acid residues or more from the C-terminal end of the protein (e.g., the C-terminal amino acid residue of the polypeptide through to about 50 to about 300 consecutive amino acid residues) (e.g., about 50, 55, 60, 65, 70, 75, 80, 85, 90, 95, 100, 120, 140, 160, 180, 200, 220, 240, 260, 280, 300, 320, 340, or 350 or more consecutive amino acid residues).

[0343] In some embodiments, a non-natural mutation comprising a base substitution in a CYP79F1 gene may produce a premature stop codon, wherein the premature stop codon results in production of no CYP79F1 protein or a truncated CYP79F1 protein (e.g., a null mutation or null allele) by the mutated CYP79F1 gene, optionally wherein the truncated CYP79F1 protein is non-functional. In some embodiments, a truncated CYP79F1 polypeptide resulting from a base substitution in the CYP79F1 gene comprises a truncation of at least about 50 to about 350 consecutive amino acid residues or more from the C-terminal end of the protein (e.g., the C-terminal amino acid residue of the polypeptide through to about 50 to about 300 consecutive amino acid residues) (e.g., about 50, 55, 60, 65, 70, 75, 80, 85, 90, 95, 100, 120, 140, 160, 180, 200, 220, 240, 260, 280, 300, 320, 340, 350 or more consecutive amino acid residues).

[0344] In some embodiments, at least one non-natural mutation in an CYP79F1 gene (e.g., a deletion of three or more consecution base pairs or a substitution of one or more base pairs) results in a deletion of at least one amino acid residue from the CYP79F1 polypeptide produced from the mutated CYP79F1 gene (e.g., 1, 2, 3, 4, 5, 6, 7, 8, 9, 10, 20, 30, 40, 50, 60, 70, 80, 90, 100, 110, 120, 130, 140, 150, 160, 170, 180, 190, 200, 220, 250, 300, 320, 350, 360, 370, 380, 390, 400, 410, 420, 430, 440, 450, 460, 470, 480, 490, 500, 510, 520, 530, 531, 532, 534, 535, 536, 537, 538, 539, 540, or 541 amino acids, or any range or value therein). In some embodiments, the deletion in the CYP79F1 gene results in a deletion of two or more consecutive amino acid residues from the CYP79F1 polypeptide.

[0345] In some embodiments, a plant may comprise one or more (e.g., 1, 2, 3, 4, 5, or more), or two or more endogenous AOP2 genes (e.g., 2, 3, 4, 5, or more). In some embodiments, a plant or part thereof of this invention comprising one or more endogenous AOP2 genes may comprise a non-natural mutation in at least one endogenous AOP2 gene, wherein the mutation results in the production of a reduced amount of AOP2 or no AOP2 and a plant or part thereof having reduced pungency and/or bitterness. In some embodiments, a plant or part thereof of this invention comprising one or more endogenous AOP2 genes may comprise a non-natural mutation one endogenous AOP2 gene, wherein the mutation results in the production of a reduced amount of AOP1 or no AOP2 and a plant or part thereof having reduced pungency and/or bitterness. In some embodiments, a plant or part thereof of this invention may comprise a non-natural mutation in two AOP2 genes, wherein the mutation in the two genes results in the production of a reduced amount of AOP2 or no AOP2, and a plant or part thereof having reduced pungency and/or bitterness. In some embodiments, a plant or part thereof of this invention may comprise a non-natural mutation in three endogenous AOP2 genes, wherein the mutation in the three genes results in the production of a reduced amount of AOP2 or no AOP2, and a plant or part thereof having reduced pungency and/or bitterness. In some embodiments, a plant or part thereof of this invention may comprise a non-natural mutation in four endogenous AOP2 genes, wherein the mutation in the four genes results in the production of a reduced amount of AOP2 or no AOP2, and a plant or part thereof having reduced pungency and/or bitterness. In some embodiments, a plant or part thereof of this invention may comprise a non-natural mutation in five endogenous AOP2 genes, wherein the mutation in the five genes results in the production of a reduced amount of AOP2 or no AOP2, and a plant or part thereof having reduced pungency and/or bitterness. A reduction in pungency and/or bitterness is as compared to a control plant that does not comprise the same mutation and is grown under the same environmental conditions.

[0346] In some embodiments, an endogenous gene encoding CYP79F1 comprises a nucleotide sequence having at least 80% sequence identity (e.g., 80, 81, 82, 83, 84, 85, 86, 87, 88, 89, 90, 91, 92, 93, 94, 95, 96, 97 98, 99, or 100%) to any one of the nucleotide sequence of SEQ ID NOs:113,114 or 737-742; or encodes a polypeptide comprising at least 80% sequence identity to any one of the amino acid sequences of SEQ ID NOs:115, 674-679, or 782-786.

[0347] In some embodiments, a mustard plant cell comprising a base editing system is provided, the base editing system comprising: (a) a CRISPR-associated effector protein; (b) a cytidine deaminase or adenosine deaminase; and (c) a guide nucleic acid (gRNA) having a spacer sequence with complementarity to an endogenous target gene encoding a CYP79F1, an endogenous target gene encoding an AOP2, and/or an endogenous target gene encoding an myrosinase. In some embodiments, the gRNA of the base editing system comprises a spacer sequence having at least 80% identity to the nucleotide sequence of SEQ ID NO:116 or SEQ ID NO:117, wherein the spacers are complementary (fully or substantially (e.g., at least 70%) complementary) to a CYP79F1 gene. In some embodiments, the gRNA of the base editing system comprises a spacer sequence having at least 80% identity to any one of the nucleotide sequences of SEQ ID NOs:133-140, wherein the spacers are complementary (fully or substantially (e.g., at least 70%) complementary) to an AOP2 gene. In some embodiments, the gRNA of the base editing system comprises a spacer sequence having at least 80% identity to any one of the nucleotide sequences of SEQ ID NOs:106-112, wherein the spacers are complementary (fully or substantially (e.g., at least 70%) complementary) to a myrosinase gene. FIGS. 1-5 illustrate alignments of spacer sequences from guide nucleic acids with myrosinase gene sequences, AOP2 gene sequences and CYP79F1 gene sequences. In some embodiments, the nucleic acid binding domain of an editing system useful with this invention is from a polynucleotide-guided endonuclease, a CRISPR-Cas endonuclease (e.g., CRISPR-Cas effector protein), a zinc finger nuclease, a transcription activator-like effector nuclease (TALEN) and/or an Argonaute protein.

[0348] Further provided is a method of producing/breeding a transgene-free base-edited mustard plant, comprising: (a) crossing the plant of the present invention with a transgene free mustard plant, thereby introducing the at least one mutation, the mutation, or the modification into the mustard plant that is transgene-free; and (b) selecting a progeny plant that comprises the at least one single nucleotide substitution but is transgene-free, thereby producing a transgene free base-edited mustard plant.

[0349] In some embodiments, a transgene-free plant is a plant produced by the methods described herein and comprises a non-natural mutation in one or more myrosinase genes, one or more AOP2 genes and/or one or more CYP79F1 genes. In some embodiments, the invention provides a method of producing a transgene free plant having reduced pungency and/or bitterness, the method comprising crossing a first plant comprising a non-natural mutation in a myrosinase gene as described herein with a second plant comprising a non-natural mutation in an AOP2 gene and/or a CYP79F1 gene as described herein, selecting progeny comprising the non-natural mutation in the myrosinase gene and the non-natural mutation in the AOP2 gene and/or the CYP79F1 gene, thereby producing a transgene free plant having reduced pungency and/or bitterness. In some embodiments, the invention provides a method of producing a transgene free plant having reduced pungency and/or bitterness, the method comprising crossing a first plant comprising a non-natural mutation in an AOP2 gene as described herein with a second plant comprising a non-natural mutation in a myrosinase gene and/or a CYP79F1 gene as described herein, selecting progeny comprising the non-natural mutation in the AOP2 gene and the non-natural mutation in the myrosinase gene and/or the CYP79F1 gene, thereby producing a transgene free plant having reduced pungency and/or bitterness. In some embodiments, the invention provides a method of producing a transgene free plant having reduced pungency and/or bitterness, the method comprising crossing a first plant comprising a non-natural mutation in an CYP79F1 gene as described herein with a second plant comprising a non-natural mutation in a myrosinase gene and/or an AOP2 gene as described herein, selecting progeny comprising the non-natural mutation in the CYP79F1 gene and the non-natural mutation in the myrosinase gene and/or the AOP2 gene, thereby producing a transgene free plant having reduced pungency and/or bitterness.

[0350] Also provided is a method of providing a plurality of mustard plants exhibiting reduced pungency or bitterness, the method comprising planting two or more plants of the present invention in a growing area (e.g., a field (e.g., a cultivated field, an agricultural field), a growth chamber, a greenhouse, a recreational area, a lawn, and/or a roadside and the like), thereby providing a plurality of mustard plants exhibiting reduced pungency or bitterness as compared to a plurality of control mustard plants not comprising the mutation and grown under the same conditions.

[0351] Another aspect of the invention is a method for editing a specific site in the genome of a mustard plant cell, the method comprising: cleaving, in a site specific manner, a target site within an endogenous myrosinase gene, an endogenous AOP2 gene and/or an endogenous CYP79F1 gene, thereby generating an edit in the endogenous myrosinase gene, the endogenous AOP2 gene and/or the endogenous CYP79F1 gene of the plant cell and producing a plant cell comprising an edit in an endogenous myrosinase gene, an endogenous AOP2 gene and/or an endogenous CYP79F1 gene. In some embodiments, the plant cell comprising an edit in an endogenous myrosinase gene, an endogenous AOP2 gene and/or an endogenous CYP79F1 gene is regenerated into a plant, wherein the plant exhibits reduced pungency and/or bitterness as compared to a plant regenerated from a plant cell not comprising said edit and grown under the same conditions. In some embodiments, the edit results in a non-natural mutation. A non-natural mutation in a myrosinase gene, an AOP2 gene, or a CYP79F1 gene of a mustard plant or part thereof (including, e.g., a plant cell) may be any type of mutation, including a base substitution, a deletion and/or an insertion. In some embodiments, a non-natural mutation is a point mutation. In some embodiments, a non-natural mutation may be a substitution of at least one base pair, a deletion of at least one base pair, or an insertion of at least one base pair. In some embodiments, a non-natural mutation may comprise a base substitution to an A, a T, a G, or a C. In some embodiments, a base substitution may produce a premature stop codon, thereby producing no protein or a truncated protein, optionally wherein the truncated protein is non-functional. In some embodiments, a deletion of a base may result in an in-frame or out of frame mutation, optionally wherein the in-frame or out of frame mutation results in a premature stop codon. In some embodiments, a mutation in a gene that results in a premature stop codon produces no polypeptide or a produces a non-functional polypeptide, optionally wherein the non-functional polypeptide is a truncated polypeptide. In some embodiments, a non-natural mutation may be a dominant-negative allele, semi-dominant allele, weak loss of function allele, null allele, a hypermorphic mutation or a hypomorphic mutation. In some embodiments, a mutation is a null allele. In some embodiments, a mutation may be a full knockout mutant CYP79F1 allele, a full knockout mutant AOP2 allele and/or a full knockout mutant myrosinase allele that results in the production of a nonfunctional CYP79F1 protein or no production of the CYP79F1, production of a nonfunctional AOP2 protein or no production of a AOP2 protein, and/or production of a nonfunctional myrosinase protein or no production of a myrosinase protein.

[0352] The present invention further provides a method for making a mustard plant, comprising: (a) contacting a population of mustard plant cells comprising a DNA sequence that encodes a wild type endogenous myrosinase, a wild type endogenous AOP2 and/or a wild type endogenous CYP79F1 with a nuclease linked to a nucleic acid binding domain (e.g., editing system) that binds to a target sequence in the wild type endogenous myrosinase, the wild type endogenous AOP2 or the wild type endogenous CYP79F1, wherein (b) selecting a mustard plant cell from said population in which at least one DNA sequence encoding the wild type endogenous myrosinase, the wild type endogenous AOP2 and/or the wild type endogenous CYP79F1 has been mutated, wherein the mutation comprises a deletion of at least one nucleotide in the at least one DNA sequence; and (c) growing the selected plant cell into a mustard plant.

[0353] Additionally provided is a method for producing a mustard plant or part thereof comprising at least one cell in which an endogenous myrosinase gene, an endogenous AOP2 gene and/or an endogenous CYP79F1 gene is mutated, the method comprising contacting a target site in the endogenous myrosinase gene, the endogenous AOP2 gene and/or the endogenous CYP79F1 gene in the mustard plant or plant part with a nuclease linked to a nucleic acid binding domain (e.g., editing system) that binds to the target site, thereby producing a mustard plant or part thereof comprising at least one cell having a mutation in the endogenous myrosinase gene, the endogenous AOP2 gene and/or the endogenous CYP79F1 gene.

[0354] Also provided is a method for producing a mustard plant having a phenotype of reduced pungency and/or reduced bitterness, the method comprising (a) contacting a mustard plant cell comprising a wild type endogenous myrosinase gene, a wild type endogenous AOP2 gene and/or a wild type endogenous CYP79F1 gene with a nuclease targeting the wild type endogenous myrosinase gene, the wild type endogenous AOP2 gene or the wild type endogenous CYP79F1 gene, wherein the nuclease is linked to a DNA binding domain that binds to a target site in the wild type endogenous wild type endogenous myrosinase gene, the wild type endogenous AOP2 gene or the wild type endogenous CYP79F1 gene, and (b) growing the plant cell into a mustard plant, thereby producing a mustard plant having a phenotype of reduced pungency and/or reduced bitterness. A reduction in pungency is as compared to a control plant that does not comprise the same mutation and is grown under the same environmental conditions.

[0355] Additionally provided is a method for reducing pungency and/or bitterness in flavor or aroma in a mustard plant or part thereof, comprising (a) contacting a mustard plant cell comprising a wild type endogenous myrosinase gene, a wild type endogenous AOP2 gene and/or a wild type endogenous CYP79F1 gene with a nuclease targeting the wild type endogenous myrosinase gene, the wild type endogenous AOP2 gene or the wild type endogenous CYP79F1 gene, wherein the nuclease is linked to a DNA binding domain that binds to a target site in the wild type endogenous myrosinase gene, the wild type endogenous AOP2 gene or the wild type endogenous CYP79F1 gene to produce a plant cell comprising a mutation in the wild type endogenous myrosinase gene, the wild type endogenous AOP2 gene or the wild type endogenous CYP79F1 gene; and (b) growing the plant cell into a plant comprising the mutation in the wild type endogenous myrosinase gene, the wild type endogenous AOP2 gene and/or the wild type endogenous CYP79F1 gene, thereby reducing pungency and/or bitterness in flavor or aroma in a mustard plant or part thereof.

[0356] The present invention further provides a method for producing a mustard plant or part thereof comprising at least one cell having a mutated endogenous myrosinase gene, a mutated endogenous AOP2 gene and/or a mutated endogenous CYP79F1 gene, the method comprising contacting a target site in an endogenous myrosinase gene, an endogenous AOP2 gene and/or an endogenous CYP79F1 gene in the mustard plant or plant part with a nuclease comprising a cleavage domain and a DNA-binding domain, wherein the DNA binding domain binds to a target site in the endogenous myrosinase gene, the endogenous AOP2 gene and/or the endogenous CYP79F1 gene, thereby producing the plant or part thereof comprising at least one cell having a mutated endogenous myrosinase gene, a mutated endogenous AOP2 gene and/or a mutated endogenous CYP79F1 gene.

[0357] A method of producing a mustard plant or part thereof comprising a mutated endogenous myrosinase gene, a mutated endogenous AOP2 gene and/or a mutated endogenous CYP79F1 gene and having a phenotype of reduced pungency and/or bitterness is provided, the method comprising contacting a target site in an endogenous myrosinase gene, an endogenous AOP2 gene and/or an endogenous CYP79F1 gene with a nuclease comprising a cleavage domain and a DNA-binding domain (e.g., editing system) comprising a nucleic acid binding domain that binds to the target site in the endogenous myrosinase gene, the endogenous AOP2 gene and/or the endogenous CYP79F1 gene, thereby producing a mustard plant or part thereof comprising a mutated endogenous myrosinase gene, a mutated endogenous AOP2 gene and/or a mutated endogenous CYP79F1 gene and having reduced pungency and/or bitterness as compared to a control mustard plant (or part thereof) grown under the same conditions and does not comprise the mutation.

[0358] In some embodiments, an endogenous (e.g., wild type) myrosinase gene comprises a nucleotide sequence having at least 80% sequence identity (e.g., 80, 81, 82, 83, 84, 85, 86, 87, 88, 89, 90, 91, 92, 93, 94, 95, 96, 97 98, 99, or 100%) to any one of the nucleotide sequence of SEQ ID NOs:66-92 or 680-721; or encodes a polypeptide comprising at least 80% sequence identity to any one of the amino acid sequences of SEQ ID NOs:93-105, 617-658 or 743-775. In some embodiments, an endogenous (e.g., wild type) AOP2 gene comprises a nucleotide sequence having at least 80% sequence identity (e.g., 80, 81, 82, 83, 84, 85, 86, 87, 88, 89, 90, 91, 92, 93, 94, 95, 96, 97 98, 99, or 100%) to any one of the nucleotide sequence of SEQ ID NOs:118-127 or 722-736; or encodes a polypeptide comprising at least 80% sequence identity to any one of the amino acid sequences of SEQ ID NOs:128-132, 659-673 or 776-781. In some embodiments, an endogenous (e.g., wild type) CYP79F1 gene comprises a nucleotide sequence having at least 80% sequence identity (e.g., 80, 81, 82, 83, 84, 85, 86, 87, 88, 89, 90, 91, 92, 93, 94, 95, 96, 97 98, 99, or 100%) to any one of the nucleotide sequence of SEQ ID NOs:113,114 or 737-742; or encodes a polypeptide comprising at least 80% sequence identity to any one of the amino acid sequences of SEQ ID NOs:115, 674-679, or 782-786.

[0359] In some embodiments, a nuclease targeting the wild type endogenous myrosinase gene, a nuclease comprising a cleavage domain and a DNA-binding domain, a nuclease linked to a nucleic acid binding domain (e.g., editing system) that binds to the target site and/or a nuclease linked to a nucleic acid binding domain (e.g., editing system) that binds to a target sequence cleaves an endogenous myrosinase gene, an endogenous AOP2 gene and/or an endogenous CYP79F1 gene, thereby introducing a mutation into the endogenous myrosinase gene, the endogenous AOP2 gene and/or the endogenous CYP79F1 gene. In some embodiments, the nuclease is a zinc finger nuclease, a transcription activator-like effector nucleases (TALEN), an endonuclease (e.g. Fok1) or a CRISPR-Cas effector protein. In some embodiments, a DNA binding domain is a zinc finger, a transcription activator-like DNA binding domain (TAL), an argonaute or a CRISPR-Cas effector DNA binding domain.

[0360] In some embodiments, the mutation that is introduced may be a non-natural mutation, optionally wherein the non-natural mutation is a dominant-negative allele, semi-dominant allele, weak loss of function allele, null allele, a hypermorphic mutation or a hypomorphic mutation. In some embodiments, the mutation that is introduced results in a null allele. In some embodiments, the mutation is a base substitution, a base insertion or a base deletion, optionally wherein a base deletion may be an in-frame deletion or an out-of-frame deletion. In some embodiments, a non-natural mutation results in a premature stop codon. In some embodiments, a non-natural mutation is a full knockout mutant CYP79F1 allele, a full knockout mutant AOP2 allele and/or a full knockout mutant myrosinase allele, optionally wherein the full knockout mutant CYP79F1 allele results in the production of a nonfunctional CYP79F1 protein or no production of a CYP79F1 protein, the full knockout mutant AOP2 allele results in the production of a nonfunctional AOP2 protein or no production of a AOP2 protein, and the full knockout mutant myrosinase allele results in the production of a nonfunctional myrosinase protein or no production of a myrosinase protein. In some embodiments, a mutation of an endogenous myrosinase gene, an endogenous AOP2 gene or an endogenous CYP79F1 gene results in a truncated CYP79F1 protein, a truncated AOP2 protein, or a truncated myrosinase protein, respectively. In some embodiments, a non-natural mutation as described herein produces a plant (or part thereof) having the phenotype of reduced pungency and/or reduced bitterness in flavor and/or aroma as compared to a control plant (e.g., does not comprise said non-natural mutation and is grown under the same environmental conditions as the plant comprising said non-natural mutation.

[0361] In some embodiments, a mustard plant of this invention exhibits reduced pungency. In some embodiments, a mustard plant of the invention exhibits reduced bitterness. In some embodiments, a mustard plant of the invention exhibits reduced pungency and reduced bitterness. In some embodiments, a mustard plant of the invention comprises a mutation in at least one myrosinase gene and exhibits reduced bitterness. In some embodiments, a mustard plant of the invention comprises a mutation in at least one AOP2 gene and exhibits reduced pungency and reduced bitterness. In some embodiments, a mustard plant of the invention comprises a mutation in at least one CYP79F1 gene and exhibits reduced pungency and reduced bitterness. A reduction in pungency and/or bitterness is as compared to a control plant that does not comprise the same mutation and is grown under the same environmental conditions as the mustard plant comprising the mutation.

[0362] A mustard plant or part thereof (e.g., a plant in the Brassicaceae family, i.e., Cruciferae family or mustard family) useful with the invention includes any mustard plant comprising glucosinolates (e.g., a plant that produces glucosinolates or that breaks down (metabolizes) glucosinolates; e.g., a plant comprising at least one myrosinase gene or a plant with a at least one AOP2 gene and/or at least one CYP79F1 gene). In some embodiments, the mustard plant or part thereof includes, but is not limited to, a kale plant or part thereof, a collard plant or part thereof, a spinach plant or part thereof, a cabbage plant or part thereof, a beet plant or part thereof, a watercress plant or part thereof, a lettuce plant or part thereof (e.g. romaine), a swiss chard plant or part thereof, an arugula plant or part thereof, an endive plant or part thereof, a bok choy plant or part thereof, a rutabaga plant or part thereof, a turnip plant or part thereof, a mustard plant or part thereof, a cabbage plant or part thereof, a broccoli plant or part thereof, a cauliflower plant or part thereof, a Brussels sprout plant or part thereof, a radish plant or part thereof, or a kohlrabi plant or part thereof. In some embodiments, the mustard plant or part thereof includes, but is not limited to, Brassica oleracea (e.g., B. oleracea var. oleracea, B. oleracea var. capitata, B. oleracea var. botrytis, B. oleracea var. gemmifera, B. oleracea var. sabauda, B. oleracea var. gongyiodes, B. oleracea var. italic, B. oleracea var. sabellica, B. oleracea var. acephala), Brassica juncea, Brassica rapa (B. rapa subsp. pekinensis, B. rapa subsp. Chinensis, B. rapa subsp. rapa), Brassica napas, Brassica carinata, Brassica campestris, Brassica nigra or Raphanus raphanistrum (e.g., Raphanus raphanistrum subsp. Sativus).

[0363] In some embodiments, a plant (e.g., mustard plant) may be regenerated from any plant part of this invention, including a plant cell, comprising a mutation in an endogenous gene encoding a cytochrome P450 mono-oxygenase (i.e., CYP79F1, homomethionine N-monooxygenase; EC 1.14.14.42), an endogenous gene encoding a 2-oxo acid-dependent dioxygenase (i.e., AOP2, 2-oxoglutarate-dependent dioxygenase; EC 1.14.11.M8) and/or an endogenous gene encoding a myrosinase (i.e., glucosinolase, thioglucosidase (e.g., β-thioglucosidase), thioglucoside glucohydrolase; EC 3.2.1.147 (EC 3.2.3.1 transferred to 3.2.1.147)). In some embodiments, the regenerated mustard plant exhibits reduced pungency. In some embodiments, the regenerated plant exhibits reduced bitterness. In some embodiments, the regenerated mustard plant exhibits reduced pungency and reduced bitterness. In some embodiments, the regenerated mustard plant comprises a mutation in at least one myrosinase gene and exhibits reduced bitterness. In some embodiments, the regenerated mustard plant comprises a mutation in at least one AOP2 gene and exhibits reduced pungency and reduced bitterness. In some embodiments, the regenerated mustard plant comprises a mutation in at least one CYP79F1 gene and exhibits reduced pungency and reduced bitterness. A reduction in pungency is as compared to a control plant that does not comprise the same mutation and is grown under the same environmental conditions as the plant comprising said mutation.

[0364] The present invention further provides a guide nucleic acid (e.g., gRNA, gDNA, crRNA, crDNA) that binds to a target site in an endogenous myrosinase gene, in an endogenous AOP2 gene or in an endogenous CYP79F1 gene. In some embodiments, the guide nucleic acid comprises a spacer sequence having at least 80% identity to the nucleotide sequence of SEQ ID NO:116 or SEQ ID NO:117, wherein the spacers are complementary (fully or substantially (e.g., at least 70%) complementary) to a CYP79F1 gene. In some embodiments, the gRNA of the base editing system comprises a spacer sequence having at least 80% identity to any one of the nucleotide sequences of SEQ ID NOs:133-140, wherein the spacers are complementary (fully or substantially (e.g., at least 70%) complementary) to an AOP2 gene. In some embodiments, the gRNA of the base editing system comprises a spacer sequence having at least 80% identity to any one of the nucleotide sequences of SEQ ID NOs:106-112, wherein the spacers are complementary (fully or substantially (e.g., at least 70%) complementary) to a myrosinase gene. In some embodiments, the guide nucleic acid comprises a spacer sequence having the nucleotide sequence of SEQ ID NO:116 or SEQ ID NO:117, any one of SEQ ID NOs:106-112, or any one of SEQ ID NOs:133-140.

[0365] In some embodiments, the endogenous myrosinase gene comprising the target site to which the guide nucleic acid binds comprises a nucleotide sequence having at least 80% sequence identity (e.g., 80, 81, 82, 83, 84, 85, 86, 87, 88, 89, 90, 91, 92, 93, 94, 95, 96, 97 98, 99, or 100%) to any one of the nucleotide sequence of SEQ ID NOs:66-92 or 680-721; or encodes a polypeptide comprising at least 80% sequence identity to any one of the amino acid sequences of SEQ ID NOs:93-105, 617-658 or 743-775. In some embodiments, the endogenous AOP2 gene comprising the target site to which the guide nucleic acid binds comprises a nucleotide sequence having at least 80% sequence identity (e.g., 80, 81, 82, 83, 84, 85, 86, 87, 88, 89, 90, 91, 92, 93, 94, 95, 96, 97 98, 99, or 100%) to any one of the nucleotide sequence of SEQ ID NOs:118-127 or 722-736; or encodes a polypeptide comprising at least 80% sequence identity to any one of the amino acid sequences of SEQ ID NOs:128-132, 659-673 or 776-781. In some embodiments, the endogenous CYP79F1 gene comprising the target site to which the guide nucleic acid binds comprises a nucleotide sequence having at least 80% sequence identity (e.g., 80, 81, 82, 83, 84, 85, 86, 87, 88, 89, 90, 91, 92, 93, 94, 95, 96, 97 98, 99, or 100%) to any one of the nucleotide sequence of SEQ ID NOs:113,114 or 737-742, or encodes a polypeptide comprising at least 80% sequence identity to any one of the amino acid sequences of SEQ ID NOs:115, 674-679, or 782-786.

[0366] The present invention further provides a system comprising the guide nucleic acid of the invention and a CRISPR-Cas effector protein that associates with the guide nucleic acid. In some embodiments the system further comprises a tracr nucleic acid that associates with the guide nucleic acid and a CRISPR-Cas effector protein, optionally wherein the tracr nucleic acid and the guide nucleic acid are covalently linked.

[0367] In some embodiments, the present invention provides a gene editing system comprising a CRISPR-Cas effector protein in association with a guide nucleic acid, wherein the guide nucleic acid comprises a spacer sequence that binds to an endogenous myrosinase gene, in an endogenous AOP2 gene or in an endogenous CYP79F1 gene as described herein. In some embodiments, a gene editing system of the invention may further comprising a tracr nucleic acid that associates with the guide nucleic acid and a CRISPR-Cas effector protein, optionally wherein the tracr nucleic acid and the guide nucleic acid are covalently linked.

[0368] In some embodiments, the endogenous myrosinase gene to which the spacer sequence of a gene editing system of the invention binds comprises a nucleotide sequence having at least 80% sequence identity (e.g., 80, 81, 82, 83, 84, 85, 86, 87, 88, 89, 90, 91, 92, 93, 94, 95, 96, 97 98, 99, or 100%) to any one of the nucleotide sequence of SEQ ID NOs:66-92 or 680-721; or encodes a polypeptide comprising at least 80% sequence identity to any one of the amino acid sequences of SEQ ID NOs:93-105, 617-658 or 743-775. In some embodiments, the endogenous AOP2 gene to which the spacer sequence of a gene editing system of the invention binds comprises a nucleotide sequence having at least 80% sequence identity (e.g., 80, 81, 82, 83, 84, 85, 86, 87, 88, 89, 90, 91, 92, 93, 94, 95, 96, 97 98, 99, or 100%) to any one of the nucleotide sequence of SEQ ID NOs:118-127 or 722-736; or encodes a polypeptide comprising at least 80% sequence identity to any one of the amino acid sequences of SEQ ID NOs:128-132, 659-673 or 776-781. In some embodiments, the endogenous CYP79F1 gene to which the spacer sequence of a gene editing system of the invention binds comprises a nucleotide sequence having at least 80% sequence identity (e.g., 80, 81, 82, 83, 84, 85, 86, 87, 88, 89, 90, 91, 92, 93, 94, 95, 96, 97 98, 99, or 100%) to any one of the nucleotide sequence of SEQ ID NOs:113,114 or 737-742; or encodes a polypeptide comprising at least 80% sequence identity to any one of the amino acid sequences of SEQ ID NO:115, 674-679, or 782-786.

[0369] In some embodiments the guide nucleic acid of a gene editing system of the invention comprises a spacer sequence having at least 80% identity to the nucleotide sequence of SEQ ID NO:116 or SEQ ID NO:117, wherein the spacers are complementary (fully or substantially (e.g., at least 70%) complementary) to a CYP79F1 gene. In some embodiments, the gRNA of the base editing system comprises a spacer sequence having at least 80% identity to any one of the nucleotide sequences of SEQ ID NOs:133-140, wherein the spacers are complementary (fully or substantially (e.g., at least 70%) complementary) to an AOP2 gene. In some embodiments, the gRNA of the base editing system comprises a spacer sequence having at least 80% identity to any one of the nucleotide sequences of SEQ ID NOs:106-112, wherein the spacers are complementary (fully or substantially (e.g., at least 70%) complementary) to a myrosinase gene. In some embodiments, the guide nucleic acid of a gene editing system of the invention comprises a spacer sequence having the nucleotide sequence of SEQ ID NO:116 or SEQ ID NO:117, any one of SEQ ID NOs:106-112, or any one of SEQ ID NOs:133-140.

[0370] The present invention further provides a complex comprising a CRISPR-Cas effector protein comprising a cleavage domain and a guide nucleic acid, wherein the guide nucleic acid binds to a target site in an endogenous myrosinase gene, in an endogenous AOP2 gene or in an endogenous CYP79F1 gene, wherein the cleavage domain cleaves a target strand in the endogenous myrosinase gene, in the endogenous AOP2 gene or in the endogenous CYP79F1 gene as described herein. In some embodiments, an endogenous myrosinase gene comprising a target site to which the guide nucleic acid of a complex of this invention binds comprises a nucleotide sequence having at least 80% sequence identity (e.g., 80, 81, 82, 83, 84, 85, 86, 87, 88, 89, 90, 91, 92, 93, 94, 95, 96, 97 98, 99, or 100%) to any one of the nucleotide sequence of SEQ ID NOs:66-92 or 680-721; or encodes a polypeptide comprising at least 80% sequence identity to any one of the amino acid sequences of SEQ ID NOs:93-105, 617-658 or 743-775. In some embodiments, an endogenous AOP2 gene comprising a target site to which the guide nucleic acid of a complex of this invention binds comprises a nucleotide sequence having at least 80% sequence identity (e.g., 80, 81, 82, 83, 84, 85, 86, 87, 88, 89, 90, 91, 92, 93, 94, 95, 96, 97 98, 99, or 100%) to any one of the nucleotide sequence of SEQ ID NOs:118-127 or 722-736; or encodes a polypeptide comprising at least 80% sequence identity to any one of the amino acid sequences of SEQ ID NOs:128-132, 659-673 or 776-781. In some embodiments, an endogenous CYP79F1 gene comprising a target site to which the guide nucleic acid of a complex of this invention binds comprises a nucleotide sequence having at least 80% sequence identity (e.g., 80, 81, 82, 83, 84, 85, 86, 87, 88, 89, 90, 91, 92, 93, 94, 95, 96, 97 98, 99, or 100%) to any one of the nucleotide sequence of SEQ ID NOs:113,114 or 737-742; or encodes a polypeptide comprising at least 80% sequence identity to any one of the amino acid sequences of SEQ ID NOs:115, 674-679, or 782-786.

[0371] Further provided is an expression cassette comprising a (a) polynucleotide encoding CRISPR-Cas effector protein comprising a cleavage domain and (b) a guide nucleic acid that binds to a target site in an endogenous myrosinase gene, in an endogenous AOP2 gene or in an endogenous CYP79F1 gene, wherein the guide nucleic acid comprises a spacer sequence that is complementary to and binds to a sequence having at least 80% sequence identity to at least a portion of a sequence having at least 80% sequence identity to the nucleotide sequence of any one of SEQ ID NOs:66-92, SEQ ID NO:113, SEQ ID NO:114, SEQ ID NOs:118-127 or SEQ ID NOs:68-742, optionally wherein a portion is about 2 to about 22 consecutive nucleotides in length.

[0372] Additionally provided is a nucleic acid encoding a dominant-negative allele, semi-dominant allele, weak loss of function allele, null allele, a hypermorphic mutation or a hypomorphic mutation of a myrosinase gene, a CYP79F1 gene or an AOP2 gene. In some embodiments, the nucleic acid encodes a null allele. In some embodiments, the nucleic acid that encodes a null allele is a full knockout mutant CYP79F1 allele, a full knockout mutant AOP2 allele and/or a full knockout mutant myrosinase allele. In some embodiments, the full knockout mutant CYP79F1 allele results in the production of a nonfunctional CYP79F1 protein or no production of a CYP79F1 protein. In some embodiments, the full knockout mutant AOP2 allele results in the production of a nonfunctional AOP2 protein or no production of an AOP2 protein. In some embodiments, the full knockout mutant myrosinase allele results in the production of a nonfunctional myrosinase protein or no production of a myrosinase protein. In some embodiments, the present invention provides a mustard plant comprising the nucleic acid encoding a null allele of a myrosinase gene, a CYP79F1 gene or an AOP2 gene. In some embodiments, the mustard plant comprising a nucleic acid of this invention encoding the null allele exhibits reduced pungency. In some embodiments, the mustard plant comprising a nucleic acid of this invention encoding the null allele exhibits reduced bitterness. In some embodiments, the mustard plant comprising a nucleic acid of this invention encoding the null allele exhibits reduced pungency and reduced bitterness. In some embodiments, the mustard plant comprising a nucleic acid of this invention encoding at least one myrosinase null allele exhibits reduced bitterness. In some embodiments, the mustard plant comprising a nucleic acid of this invention encoding at least one AOP2 null allele exhibits reduced pungency and reduced bitterness. In some embodiments, the mustard plant comprising a nucleic acid of this invention encoding at least one CYP79F1 null allele and exhibits reduced pungency and reduced bitterness. A reduction in pungency and/or bitterness is as compared to a control plant that does not comprise the same mutation (e.g., the same null allele) and is grown under the same environmental conditions as the mustard plant comprising the null allele.

[0373] The present invention further provides a method of producing a mustard plant having at least one myrosinase gene and/or by at least one AOP2 gene and/or by a CYP79F1 gene with reduced expression (e.g., 5%-100% reduced), and/or reduced production (e.g., 5%-100% reduced) of at least one myrosinase, at least one AOP2 or a CYP79F1, the method comprising (a) contacting a population of mustard plant cells comprising a DNA sequence that encodes a wild type endogenous myrosinase, a wild type endogenous AOP2 and/or a wild type endogenous CYP79F1 with (i) a nuclease linked to a nucleic acid binding domain (e.g., editing system) that binds to a target sequence in the wild type endogenous myrosinase, the wild type endogenous AOP2 or the wild type endogenous CYP79F1, (ii) an RNAi that targets the wild type endogenous myrosinase, the wild type endogenous AOP2 or the wild type endogenous CYP79F1, or (iii) or an siRNA that targets the wild type endogenous myrosinase, the wild type endogenous AOP2 or the wild type endogenous, (b) selecting a mustard plant cell from said population having reduced expression of at least one myrosinase gene, of at least one AOP2 gene or of the CYP79F1 gene, and/or reduced production of the at least one myrosinase, the at least one AOP2 or the CYP79F1; and (c) growing the selected plant cell into a mustard plant. Also provided is a mustard plant produced by this method, optionally wherein the mustard plant comprises reduced pungency and/or bitterness as compared to a control plant.

[0374] The present invention further provides a mustard plant comprising an RNAi or a siRNA that is complementary to at least one myrosinase gene, at least one AOP2 gene and/or a CYP79F1 gene and reduced expression of the at least one myrosinase gene, the at least one AOP2 gene and/or the CYP79F1 gene.

[0375] A mustard plant or part thereof may include but is not limited to a kale plant or part thereof, a collard plant or part thereof, a spinach plant or part thereof, a cabbage plant or part thereof, a beet plant or part thereof, a watercress plant or part thereof, a lettuce plant or part thereof (e.g. romaine), a swiss chard plant or part thereof, an arugula plant or part thereof, an endive plant or part thereof, a bok choy plant or part thereof, a rutabaga plant or part thereof, a turnip plant or part thereof, a mustard plant or part thereof, a cabbage plant or part thereof, a broccoli plant or part thereof, a cauliflower plant or part thereof, a Brussels sprout plant or part thereof, a radish plant or part thereof, or a kohlrabi plant or part thereof. In some embodiments, the mustard plant or part thereof includes, but is not limited to, Brassica oleracea (e.g., B. oleracea var. oleracea, B. oleracea var. capitata, B. oleracea var. botrytis, B. oleracea var. gemmifera, B. oleracea var. sabauda, B. oleracea var. gongyiodes, B. oleracea var. italic, B. oleracea var. sabellica, B. oleracea var. acephala), Brassica juncea, Brassica rapa (B. rapa subsp. pekinensis, B. rapa subsp. Chinensis, B. rapa subsp. rapa), Brassica napas, Brassica carinata, Brassica campestris, Brassica nigra or Raphanus raphanistrum (e.g., Raphanus raphanistrum subsp. Sativus).

[0376] In some embodiments, the wild type endogenous myrosinase gene which is targeted by the siRNA or the RNAi or which comprises the target site to which the nucleic acid binding domain binds comprises a nucleotide sequence having at least 80% sequence identity (e.g., 80, 81, 82, 83, 84, 85, 86, 87, 88, 89, 90, 91, 92, 93, 94, 95, 96, 97 98, 99, or 100%) to any one of the nucleotide sequence of SEQ ID NOs:66-92 or 680-721; or encodes a polypeptide comprising at least 80% sequence identity to any one of the amino acid sequences of SEQ ID NOs:93-105, 617-658 or 743-775. In some embodiments, the wild type endogenous AOP2 gene which is targeted by the siRNA or the RNAi or which comprises the target site to which the nucleic acid binding domain binds comprises a nucleotide sequence having at least 80% sequence identity (e.g., 80, 81, 82, 83, 84, 85, 86, 87, 88, 89, 90, 91, 92, 93, 94, 95, 96, 97 98, 99, or 100%) to any one of the nucleotide sequence of SEQ ID NOs:SEQ ID NOs:118-127 or 722-736; or encodes a polypeptide comprising at least 80% sequence identity to any one of the amino acid sequences of SEQ ID NOs:128-132, 659-673 or 776-781. In some embodiments, the wild type endogenous CYP79F1 gene which is targeted by the siRNA or the RNAi or which comprises the target site to which the nucleic acid binding domain binds comprises a nucleotide sequence having at least 80% sequence identity (e.g., 80, 81, 82, 83, 84, 85, 86, 87, 88, 89, 90, 91, 92, 93, 94, 95, 96, 97 98, 99, or 100%) to any one of the nucleotide sequence of SEQ ID NOs:113,114 or 737-742; or encodes a polypeptide comprising at least 80% sequence identity to any one of the amino acid sequences of SEQ ID NOs:115, 674-679, or 782-786.

[0377] An editing system useful with this invention can be any site-specific (sequence-specific) genome editing system now known or later developed, which system can introduce mutations in target specific manner. For example, an editing system (e.g., site- or sequence-specific editing system) can include, but is not limited to, a CRISPR-Cas editing system, a meganuclease editing system, a zinc finger nuclease (ZFN) editing system, a transcription activator-like effector nuclease (TALEN) editing system, a base editing system and/or a prime editing system, each of which can comprise one or more polypeptides and/or one or more polynucleotides that when expressed as a system in a cell can modify (mutate) a target nucleic acid in a sequence specific manner. In some embodiments, an editing system (e.g., site- or sequence-specific editing system) can comprise one or more polynucleotides and/or one or more polypeptides, including but not limited to a nucleic acid binding domain (DNA binding domain), a nuclease, and/or other polypeptide, and/or a polynucleotide.

[0378] In some embodiments, an editing system can comprise one or more sequence-specific nucleic acid binding domains (DNA binding domains) that can be from, for example, a polynucleotide-guided endonuclease, a CRISPR-Cas endonuclease (e.g., CRISPR-Cas effector protein), a zinc finger nuclease, a transcription activator-like effector nuclease (TALEN) and/or an Argonaute protein. In some embodiments, an editing system can comprise one or more cleavage domains (e.g., nucleases) including, but not limited to, an endonuclease (e.g., Fok1), a polynucleotide-guided endonuclease, a CRISPR-Cas endonuclease (e.g., CRISPR-Cas effector protein), a zinc finger nuclease, and/or a transcription activator-like effector nuclease (TALEN). In some embodiments, an editing system can comprise one or more polypeptides that include, but are not limited to, a deaminase (e.g., a cytosine deaminase, an adenine deaminase), a reverse transcriptase, a Dna2 polypeptide, and/or a 5′ flap endonuclease (FEN). In some embodiments, an editing system can comprise one or more polynucleotides, including, but is not limited to, a CRISPR array (CRISPR guide) nucleic acid, extended guide nucleic acid, and/or a reverse transcriptase template.

[0379] In some embodiments, a method of modifying or editing an endogenous gene may comprise contacting a target nucleic acid (e.g., a nucleic acid encoding an endogenous myrosinase gene, AOP2 gene, or CYP79F1 gene) with a base-editing fusion protein (e.g., a sequence specific DNA binding protein (e.g., a CRISPR-Cas effector protein or domain) fused to a deaminase domain (e.g., an adenine deaminase and/or a cytosine deaminase) and a guide nucleic acid, wherein the guide nucleic acid is capable of guiding/targeting the base editing fusion protein to the target nucleic acid, thereby editing a locus within the target nucleic acid. In some embodiments, a base editing fusion protein and guide nucleic acid may be comprised in one or more expression cassettes. In some embodiments, the target nucleic acid may be contacted with a base editing fusion protein and an expression cassette comprising a guide nucleic acid. In some embodiments, the sequence-specific DNA binding fusion proteins and guides may be provided as ribonucleoproteins (RNPs). In some embodiments, a cell may be contacted with more than one base-editing fusion protein and/or one or more guide nucleic acids that may target one or more target nucleic acids in the cell.

[0380] In some embodiments, a method of modifying or editing an endogenous myrosinase gene, AOP2 gene, and/or CYP79F1 gene may comprise contacting a target nucleic acid (e.g., a nucleic acid encoding an endogenous myrosinase gene, AOP2 gene, and/or CYP79F1 gene) with a sequence-specific DNA binding fusion protein (e.g., a sequence-specific DNA binding protein (e.g., a CRISPR-Cas effector protein or domain) fused to a peptide tag, a deaminase fusion protein comprising a deaminase domain (e.g., an adenine deaminase and/or a cytosine deaminase) fused to an affinity polypeptide that is capable of binding to the peptide tag, and a guide nucleic acid, wherein the guide nucleic acid is capable of guiding/targeting the sequence-specific DNA binding fusion protein to the target nucleic acid and the sequence-specific DNA binding fusion protein is capable of recruiting the deaminase fusion protein to the target nucleic acid via the peptide tag-affinity polypeptide interaction, thereby editing a locus within the target nucleic acid. In some embodiments, the sequence-specific DNA binding fusion protein may be fused to the affinity polypeptide that binds the peptide tag and the deaminase may be fuse to the peptide tag, thereby recruiting the deaminase to the sequence-specific DNA binding fusion protein and to the target nucleic acid. In some embodiments, the sequence-specific binding fusion protein, deaminase fusion protein, and guide nucleic acid may be comprised in one or more expression cassettes. In some embodiments, the target nucleic acid may be contacted with a sequence-specific binding fusion protein, deaminase fusion protein, and an expression cassette comprising a guide nucleic acid. In some embodiments, the sequence-specific DNA binding fusion proteins, deaminase fusion proteins and guides may be provided as ribonucleoproteins (RNPs).

[0381] In some embodiments, methods such as prime editing may be used to generate a mutation in an endogenous myrosinase gene, AOP2 gene, and/or CYP79F1 gene. In prime editing, RNA-dependent DNA polymerase (reverse transcriptase, RT) and reverse transcriptase templates (RT template) are used in combination with sequence specific DNA binding domains that confer the ability to recognize and bind the target in a sequence-specific manner, and which can also cause a nick of the PAM-containing strand within the target. The DNA binding domain may be a CRISPR-Cas effector protein and in this case, the CRISPR array or guide RNA may be an extended guide that comprises an extended portion comprising a primer binding site (PSB) and the edit to be incorporated into the genome (the template). Similar to base editing, prime editing can take advantageous of the various methods of recruiting proteins for use in the editing to the target site, such methods including both non-covalent and covalent interactions between the proteins and nucleic acids used in the selected process of genome editing.

[0382] As used herein, a “CRISPR-Cas effector protein” is a protein or polypeptide or domain thereof that cleaves or cuts a nucleic acid, binds a nucleic acid (e.g., a target nucleic acid and/or a guide nucleic acid), and/or that identifies, recognizes, or binds a guide nucleic acid as defined herein. In some embodiments, a CRISPR-Cas effector protein may be an enzyme (e.g., a nuclease, endonuclease, nickase, etc.) or portion thereof and/or may function as an enzyme. In some embodiments, a CRISPR-Cas effector protein refers to a CRISPR-Cas nuclease polypeptide or domain thereof that comprises nuclease activity or in which the nuclease activity has been reduced or eliminated, and/or comprises nickase activity or in which the nickase has been reduced or eliminated, and/or comprises single stranded DNA cleavage activity (ss DNAse activity) or in which the ss DNAse activity has been reduced or eliminated, and/or comprises self-processing RNAse activity or in which the self-processing RNAse activity has been reduced or eliminated. A CRISPR-Cas effector protein may bind to a target nucleic acid. Thus, a “CRISPR-associated effector” or “CRISPR-Cas effector protein” as used herein can be defined as any nuclease, nickase, or recombinase associated with the CRISPR (Clustered Regularly Interspaced Short Palindromic Repeats), having the capacity to introduce a single- or double-strand cleavage into a genomic target site, or having the capacity to introduce a targeted modification, including a point mutation, an insertion, or a deletion, into a genomic target site of interest. A CRISPR-Cas effector protein can act on its own, or in combination with other molecules as part of a molecular complex. The CRISPR-Cas effector protein can be a fusion molecule, or can be provided as individual molecules associating by or being associated by at least one of a covalent or noncovalent interaction with a guide (gRNA) and/or target site so that the components of the CRISPR-associated complex are brought into close physical proximity.

[0383] In some embodiments, a sequence-specific DNA binding domain may be a CRISPR-Cas effector protein. In some embodiments, a CRISPR-Cas effector protein may be from a Type I CRISPR-Cas system, a Type II CRISPR-Cas system, a Type III CRISPR-Cas system, a Type IV CRISPR-Cas system, Type V CRISPR-Cas system, or a Type VI CRISPR-Cas system. In some embodiments, a CRISPR-Cas effector protein of the invention may be from a Type II CRISPR-Cas system or a Type V CRISPR-Cas system. In some embodiments, a CRISPR-Cas effector protein may be Type II CRISPR-Cas effector protein, for example, a Cas9 effector protein. In some embodiments, a CRISPR-Cas effector protein may be Type V CRISPR-Cas effector protein, for example, a Cas12 effector protein.

[0384] In some embodiments, a CRISPR-Cas effector protein or domain thereof can include but is not limited to a Cas protein derived from S. pyogenes, S. aureus, N. meningitidis, S. thermophiles, Acidovorax avenae, Actinobacillus pleuropneumoniae, Actinobacillus succinogenes, Actinobacillus suis, Actinomyces sp., Cycliphilusdenitrificans, Aminomonas paucivorans, Bacillus cereus, Bacillus smithii, Bacillus thuringiensis, Bacteroides sp., Blastopirellula marina, Bradyrhizobium sp., Brevibacillus laterospoxus, Campylobacter coli, Campylobacter jejuni, Campylobacter lari, Candidatus puniceispirillum, Clostridium cellulolyticum, Clostridium perfringens, Corynebacterium accolens, Corynebacterium diphtheria, Corynebacterium matruchotii, Dinoroseobacter shibae, Eubacterium dolichum, Gamma proteobacterium, Gluconacetobacter diazotrophicus, Haemophilus parainfluenzae, Haemophilus sputomm, Helicobacter canadensis, Helicobacter cinaedi, Helicobacter mustelae, Ilyobacter polytropus, Kingella kingae, Lactobacillus crispatus, Listeria ivanovii, Listeria monocytogenes, Listeriaceae bacterium, Methylocystis sp., Methylosinus trichosporium, Mobiluncus mulieris, Neisseria bacilliformis, Neisseria cinerea, Neisseria flavescens, Neisseria lactamica, Neisseria meningitidis, Neisseria sp., Neisseria wadsworthii, Nitrosomonas sp., Parvibaculum lavamentivorans, Pasteurella multocida, Phascolarctobacterium succinatutens, Ralstonia syzygii, Rhodopseudomonas palustris, Rhodovulum sp., Simonsiella muelleri, Sphingomonas sp., Sporolactobacillus vineae, Staphylococcus aureus, Staphylococcus lugdunensis, Streptococcus sp., Subdoligranulum sp., Tistrella mobilis, Treponema sp., or Verminephrobacter eiseniae.

[0385] In some embodiments, the CRISPR-Cas effector protein can include a naturally-occurring Cas protein. In other embodiments, the Cas protein may be an engineered Cas protein. In some embodiments, a CRISPR-Cas effector protein may include, but is not limited to, a Cas9, C2c1, C2c3, Cas12a (also referred to as Cpf1), Cas12b, Cas12c, Cas12d, Cas12e, Cas13a, Cas13b, Cas13c, Cas13d, Casl, CaslB, Cas2, Cas3, Cas3′, Cas3″, Cas4, Cas5, Cas6, Cas7, Cas8, Cas9 (also known as Csnl and Csx12), Cas10, Csyl, Csy2, Csy3, Csel, Cse2, Cscl, Csc2, Csa5, Csn2, Csm2, Csm3, Csm4, Csm5, Csm6, Cmrl, Cmr3, Cmr4, Cmr5, Cmr6, Csbl, Csb2, Csb3, Csxl7, Csxl4, Csx10, Csx16, CsaX, Csx3, Csxl, Csxl5, Csfl, Csf2, Csf3, Csf4 (dinG), and/or Csf5 nuclease, optionally wherein the CRISPR-Cas effector protein may be a Cas9, Cas12a (Cpf1), Cas12b, Cas12c (C2c3), Cas12d (CasY), Cas12e (CasX), Cas12g, Cas12h, Cas12i, C2c4, C2c5, C2c8, C2c9, C2c10, Cas14a, Cas14b, and/or Cas14c effector protein.

[0386] In some embodiments, the CRISPR-Cas effector protein or domain thereof is an endoribonuclease such as a Cas13 protein. In some embodiments, the Cas13 protein is a Cas13a (Abudayyeh et al., Nature 550 (2017), 280-284), Cas13b (Cox et al., Science (2017) 358:6336, 1019-1027), Cas13c (Cox et al., Science (2017) 358:6336, 1019-1027), or Cas13d (Zhang et al., Cell 175 (2018), 212-223) protein.

[0387] In some embodiments, a CRISPR-Cas effector protein useful with the invention may comprise a mutation in its nuclease active site (e.g., RuvC, HNH, e.g., RuvC site of a Cas12a nuclease domain; e.g., RuvC site and/or HNH site of a Cas9 nuclease domain). A CRISPR-Cas effector protein having a mutation in its nuclease active site, and therefore, no longer comprising nuclease activity, is commonly referred to as “dead,” e.g., dCas. In some embodiments, a CRISPR-Cas effector protein domain or polypeptide having a mutation in its nuclease active site may have impaired activity or reduced activity as compared to the same CRISPR-Cas effector protein without the mutation, e.g., a nickase, e.g., Cas9 nickase, Cas12a nickase.

[0388] In some embodiments, a Cas polypeptide comprises one or more of the following activities: (a) a nickase activity, i.e., the ability to cleave a single strand, e.g., the non-complementary strand or the complementary strand, of a nucleic acid molecule; (b) a double stranded nuclease activity, i.e., the ability to cleave both strands of a double stranded nucleic acid and create a double stranded break, which in an embodiment is the presence of two nickase activities; (c) an endonuclease activity; (d) an exonuclease activity; and/or (e) a helicase activity, i.e., the ability to unwind the helical structure of a double stranded nucleic acid. In other embodiments, the Cas protein may be dead or inactive (e.g. dCas).

[0389] In some embodiments, the Cas polypeptide is fused to a heterologous polypeptide/protein that has, for example, base deaminase activity.

[0390] A CRISPR Cas9 effector protein or CRISPR Cas9 effector domain useful with this invention may be any known or later identified Cas9 nuclease. In some embodiments, a CRISPR Cas9 polypeptide can be a Cas9 polypeptide from, for example, Streptococcus spp. (e.g., S. pyogenes, S. thermophilus), Lactobacillus spp., Bifidobacterium spp., Kandleria spp., Leuconostoc spp., Oenococcus spp., Pediococcus spp., Weissella spp., and/or Olsenella spp. Example Cas9 sequences include, but are not limited to, the amino acid sequences of SEQ ID NO:53 and SEQ ID NO:54 or the nucleotide sequences of SEQ ID NOs:55-65.

[0391] In some embodiments, the CRISPR-Cas effector protein may be a Cas9 polypeptide derived from Streptococcus pyogenes and recognizes the PAM sequence motif NGG, NAG, NGA (Mali et al, Science 2013; 339(6121): 823-826). In some embodiments, the CRISPR-Cas effector protein may be a Cas9 polypeptide derived from Streptococcus thermophiles and recognizes the PAM sequence motif NGGNG and/or NNAGAAW (W=A or T) (See, e.g., Horvath et al, Science, 2010; 327(5962): 167-170, and Deveau et al, J Bacteriol 2008; 190(4): 1390-1400). In some embodiments, the CRISPR-Cas effector protein may be a Cas9 polypeptide derived from Streptococcus mutans and recognizes the PAM sequence motif NGG and/or NAAR (R=A or G) (See, e.g., Deveau et al, J BACTERIOL 2008; 190(4): 1390-1400). In some embodiments, the CRISPR-Cas effector protein may be a Cas9 polypeptide derived from Streptococcus aureus and recognizes the PAM sequence motif NNGRR (R=A or G). In some embodiments, the CRISPR-Cas effector protein may be a Cas9 protein derived from S. aureus, which recognizes the PAM sequence motif N GRRT (R=A or G). In some embodiments, the CRISPR-Cas effector protein may be a Cas9 polypeptide derived from S. aureus, which recognizes the PAM sequence motif N GRRV (R=A or G). In some embodiments, the CRISPR-Cas effector protein may be a Cas9 polypeptide that is derived from Neisseria meningitidis and recognizes the PAM sequence motif N GATT or N GCTT (R=A or G, V=A, G or C) (See, e.g., Hou et ah, PNAS 2013, 1-6). In the aforementioned embodiments, N can be any nucleotide residue, e.g., any of A, G, C or T. In some embodiments, the CRISPR-Cas effector protein may be a Cas13a protein derived from Leptotrichia shahii, which recognizes a protospacer flanking sequence (PFS) (or RNA PAM (rPAM)) sequence motif of a single 3′ A, U, or C, which may be located within the target nucleic acid.

[0392] In some embodiments, the CRISPR-Cas effector protein may be derived from Cas12a, which is a Type V Clustered Regularly Interspaced Short Palindromic Repeats (CRISPR)-Cas nuclease see, e.g., SEQ ID NOs1-20). Cas12a differs in several respects from the more well-known Type II CRISPR Cas9 nuclease. For example, Cas9 recognizes a G-rich protospacer-adjacent motif (PAM) that is 3′ to its guide RNA (gRNA, sgRNA, crRNA, crDNA, CRISPR array) binding site (protospacer, target nucleic acid, target DNA) (3′-NGG), while Cas12a recognizes a T-rich PAM that is located 5′ to the target nucleic acid (5′-TTN, 5′-TTTN. In fact, the orientations in which Cas9 and Cas12a bind their guide RNAs are very nearly reversed in relation to their N and C termini. Furthermore, Cas12a enzymes use a single guide RNA (gRNA, CRISPR array, crRNA) rather than the dual guide RNA (sgRNA (e.g., crRNA and tracrRNA)) found in natural Cas9 systems, and Cas12a processes its own gRNAs. Additionally, Cas12a nuclease activity produces staggered DNA double stranded breaks instead of blunt ends produced by Cas9 nuclease activity, and Cas12a relies on a single RuvC domain to cleave both DNA strands, whereas Cas9 utilizes an HNH domain and a RuvC domain for cleavage.

[0393] A CRISPR Cas12a effector protein/domain useful with this invention may be any known or later identified Cas12a polypeptide (previously known as Cpf1) (see, e.g., U.S. Pat. No. 9,790,490, which is incorporated by reference for its disclosures of Cpf1 (Cas12a) sequences). The term “Cas12a”, “Cas12a polypeptide” or “Cas12a domain” refers to an RNA-guided nuclease comprising a Cas12a polypeptide, or a fragment thereof, which comprises the guide nucleic acid binding domain of Cas12a and/or an active, inactive, or partially active DNA cleavage domain of Cas12a. In some embodiments, a Cas12a useful with the invention may comprise a mutation in the nuclease active site (e.g., RuvC site of the Cas12a domain). A Cas12a domain or Cas12a polypeptide having a mutation in its nuclease active site, and therefore, no longer comprising nuclease activity, is commonly referred to as deadCas12a (e.g., dCas12a). In some embodiments, a Cas12a domain or Cas12a polypeptide having a mutation in its nuclease active site may have impaired activity, e.g., may have nickase activity.

[0394] In embodiments, a CRISPR-associated effector protein or domain thereof is codon-optimized for, for example a plant genome, e.g., a mustard plant genome, e.g., a Brassica spp.

[0395] In some embodiments, a CRISPR-associated effector is a nuclease, e.g., a CRISPR nuclease, including, but not limited to, Cas9 or Cpf1 (Cas12a) nucleases. Example Cas12a polypeptides useful with this invention include, but are not limited to SEQ ID NOs:1-17. Example Cas9 polypeptides useful with this invention include, but are not limited to SEQ ID NO:53 and SEQ ID NO:54. Example Cas9 polynucleotides useful with this invention include, but are not limited to SEQ ID NOs:55-65.

[0396] In some embodiments, a CRISPR-Cas effector protein is a Cas polypeptide or domain thereof. In some embodiments, the CRISPR-Cas effector protein is a Cas polypeptide, wherein the Cas polypeptide comprises a site-specific DNA binding domain linked to at least one base editor. In some embodiments, the CRISPR-Cas effector protein or the nucleic acid sequence encoding the same includes, but is not limited to, (i) Cas9, including SpCas9, SaCas9, SaKKH-Cas9, VQR-Cas9, StICas9, (ii) Cpfl, including AsCpfl, LbCpfl, FnCpfl, (iii) CasX, or (iv) CasY, or any variant or derivative of the CRISPR-Cas effector protein, preferably wherein the CRISPR-Cas effector protein comprises a mutation in comparison to the respective wild type sequence so that the resulting CRISPR-Cas effector protein is converted to a single-strand specific DNA nickase, or to a DNA binding effector lacking all DNA cleavage ability, as described below. Therefore, in some embodiments, artificially modified CRISPR nucleases are envisaged, which might indeed not be any “nucleases” in the sense of double-strand cleaving enzymes, but which are nickases or nuclease-dead variants, which still have inherent DNA recognition and thus binding ability.

[0397] In some embodiments, a Cas polypeptide for use as a CRISPR-Cas effector protein as described above can be engineered to alter one or more properties of the Cas polypeptide. For example, in some embodiments, the Cas polypeptide comprises altered enzymatic properties, e.g., altered nuclease activity, (as compared with a naturally occurring or other reference Cas molecule) or altered helicase activity. In some embodiments, an engineered Cas polypeptide can have an alteration that alters its size, e.g., a deletion of amino acid sequence that reduces its size without significant effect on another property of the Cas polypeptide. In some embodiments, an engineered Cas polypeptide comprises an alteration that affects PAM recognition. For example, an engineered Cas polypeptide can be altered to recognize a PAM sequence other than the PAM sequence recognized by the corresponding wild type Cas protein. In some embodiments, the targeted base-editing system comprises a Cas protein as a CRISPR-associated effector domain.

[0398] Cas polypeptides with desired properties can be made in a number of ways, including alteration of a naturally occurring Cas polypeptide or parental Cas polypeptide, to provide a mutant or altered Cas polypeptide having a desired property. For example, one or more mutations can be introduced into the sequence of a parental Cas polypeptide (e.g., a naturally occurring or engineered Cas polypeptide). Such mutations and differences may comprise substitutions (e.g., conservative substitutions or substitutions of non-essential amino acids); insertions; or deletions. In some embodiments, a mutant Cas polypeptide comprises one or more mutations (e.g., at least 1, 2, 3, 4, 5, 10, 15, 20, 30, 40 or 50 mutations) relative to a parental Cas polypeptide.

[0399] In an embodiment, a mutant Cas polypeptide comprises a cleavage property that differs from a naturally occurring Cas polypeptide. In some embodiments, the Cas is a deactivated Cas (dCas) mutant, which is catalytically dead. In such embodiments, the Cas polypeptide does not comprise any intrinsic enzymatic activity and is unable to mediate target nucleic acid cleavage. In such embodiments, the dCas is fused with a heterologous protein that is capable of modifying the target nucleic acid in a non-cleavage based manner. In some embodiments, the targeted base-editing system comprises a Cas protein as a CRISPR-associated effector domain.

[0400] In some embodiments, the dCas is a dCas9 mutant. In some embodiments, a dCas protein is fused to base deaminase domains (e.g., cytidine deaminase, or adenosine deaminase). In some such cases, the dCas fusion protein is targeted by the gRNA to a specific location (i.e., sequence) in the target nucleic acid and exerts locus-specific modification such as replacing C with T (or G with A) if the fusion protein has cytidine deaminase activity) or replacing A with G (or T with C) if the fusion protein has adenosine deaminase activity.

[0401] In some embodiments, the dCas is a dCas13 mutant (Konermann et al., Cell 173 (2018), 665-676). These dCas13 mutants can then be fused to enzymes that modify RNA, including adenosine deaminases (e.g., ADAR1 and ADAR2). Adenosine deaminases convert adenine to inosine, which the translational machinery treats like guanine, thereby creating a functional A to G change in the target sequence.

[0402] In some embodiments, the CRISPR-associated effector protein is Cas9 endonuclease. In some embodiments, the CRISPR-associated effector protein is a CRISPR-Cas variant, which is dCas9 mutant or nCas9 nickase mutant. The Cas9 endonuclease has a DNA cleavage domain containing two subdomains: i) the RuvC subdomain cleaving the non-complementary single-stranded chain and ii) the HNH nuclease subdomain cleaving the chain that is complementary to gRNA. Mutations in these subdomains can inactivate Cas9 endonuclease to form deactivated Cas9 (dCas9), which is interchangeably used with “catalytically dead Cas9”. The nuclease-inactivated Cas9 retains DNA binding capacity directed by gRNA. Thus, in principle, when fused with an additional protein, the dCas9 can simply target said additional protein to almost any DNA sequence through co-expression with appropriate guide RNA. For example, catalytically dead Cas9 (dCas9), which contains Asp10Ala (D10A) and His840Ala (H840A) mutations that inactivate its nuclease activity, retains its ability to bind DNA in a guide RNA-programmed manner, but does not cleave the DNA backbone (Komor et al., nature (2016), Vol 533:420-424). In some embodiments, conjugation of dCas9 with an enzymatic or chemical catalyst that mediates the direct conversion of one base to another could enable RNA-programmed DNA base editing.

[0403] In some embodiments, the mutant Cas9 is a Cas9 nickase (nCas9) mutant. Cas9 nickase mutants comprise only one catalytically active domain (either the RuvC domain (D10A) or the HNH domain (H840A)). The Cas9 nickase mutants retain DNA binding based on gRNA specificity, but are capable of cutting only one strand of DNA resulting in a single-strand break (e.g. a “nick”). In some embodiments, two complementary Cas9 nickase mutants (e.g., one Cas9 nickase mutant with an inactivated RuvC domain and one Cas9 nickase mutant with an inactivated HNH domain) are expressed in the same cell with two gRNAs corresponding to two respective target sequences; one target sequence on the sense DNA strand, and one on the antisense DNA strand. This dual-nickase system results in staggered double stranded breaks and can increase target specificity, as it is unlikely that two off-target nicks will be generated close enough to generate a double stranded break. In some embodiments, a Cas9 nickase mutant is co-expressed with a nucleic acid repair template to facilitate the incorporation of an exogenous nucleic acid sequence by homology-directed repair.

[0404] The dCas9 of the present disclosure can be derived from Cas9 of different species, for example, derived from S. pyogenes Cas9 (SpCas9). Mutations in both the RuvC subdomain and the HNH nuclease subdomain of the SpCas9 (includes, for example, D10A and H840A mutations) inactivate S. pyogenes Cas9 nuclease, resulting in a nuclease-dead/catalytically dead Cas9 (dCas9). In some embodiments of the present disclosure, the nuclease-inactivated Cas9 comprises the dCas9. In some preferred embodiments, the nuclease-inactivated Cas9 comprises.

[0405] Inactivation of one of the subdomains by mutation allows Cas9 to gain nickase activity, i.e., resulting in a Cas9 nickase (nCas9), for example, nCas9 with a D10A mutation only.

[0406] In some embodiments, the nuclease-inactivated Cas9 comprises amino acid substitutions D10A and/or H840A relative to wild type Cas9. In some embodiments, the nuclease-inactivated Cas9 of the present disclosure loses nuclease activity completely, which is catalytically dead. In such embodiments, the nuclease-inactivated Cas9 is the dCas9 with D10A and H840A. Therefore, the term “nuclease-inactivated Cas9” refers to dCas9 and/or nCas9.

[0407] In some embodiments, a nuclease-inactivated Cas9 useful with this invention may comprises nickase activity. In some embodiments, the nuclease-inactivated Cas9 is a Cas9 nickase that retains the cleavage activity of the HNH subdomain of Cas9, whereas the cleavage activity of the RuvC subdomain is inactivated. For example, the nuclease-inactivated Cas9 contains an amino acid substitution D10A relative to wild type Cas9. In some embodiments, the nuclease-inactivated Cas9 is a nCas9 with D10A only. In some embodiments, the nuclease-inactivated Cas9 comprises the nCas9.

[0408] In some embodiments, the Cas polypeptides described herein can be engineered to alter the PAM/PFS specificity of the Cas polypeptide. In some embodiments, a mutant Cas polypeptide has a PAM/PFS specificity that is different from the PAM/PFS specificity of the parental Cas polypeptide. For example, a naturally occurring Cas protein can be modified to alter the PAM/PFS sequence that the mutant Cas polypeptide recognizes to decrease off target sites, improve specificity, or eliminate a PAM/PFS recognition requirement. In some embodiments, a Cas protein can be modified to increase the length of the PAM/PFS recognition sequence. In some embodiments, the length of the PAM recognition sequence is at least 4, 5, 6, 7, 8, 9, 10 or 15 amino acids in length. Cas polypeptides that recognize different PAM/PFS sequences and/or have reduced off-target activity can be generated using directed evolution. Exemplary methods and systems that can be used for directed evolution of Cas polypeptides are described, e.g., in Esvelt et al. Nature 2011, 472(7344): 499-503. Exemplary Cas mutants are described in International PCT Publication No. WO 2015/161276 and Konermann et al., Cell 173 (2018), 665-676, which are incorporated herein by reference in their entireties.

[0409] The term “CRISPR complex”, “CRISPR endonuclease complex”, “CRISPR Cas complex”, or “CRISPR-gRNA complex” are used interchangeably herein. “CRISPR complex” refers to, for example, a Cas9 nuclease and/or other CRISPR-associated effector (e.g., Cas12a/Cpf1) complexed with a guide RNA (gRNA). The term “CRISPR complex” thus refers to a combination of CRISPR endonuclease and guide RNA (and any other CRISPR nucleotide sequences/polypeptides) capable of inducing a double stranded break at a CRISPR landing site. In some embodiments, “CRISPR complex” of the present disclosure refers to a combination of catalytically dead Cas9 protein and guide RNA capable of targeting a target sequence, but not capable of inducing a double stranded break at a CRISPR landing site because it loses a nuclease activity. In other embodiments, “CRISPR complex” of the present disclosure refers to a combination of Cas9 nickase and guide RNA capable of introducing gRNA-targeted single-strand breaks in DNA instead of the doublestrand breaks created by wild type Cas enzymes.

[0410] As used herein, the term “directing sequence-specific binding” in the context of CRISPR complexes refers to a guide RNA's ability to recruit a CRISPR endonuclease and/or a CRISPR-Cas effector protein to a CRISPR landing site.

[0411] As used herein, the term “deaminase” refers to an enzyme that catalyzes the deamination reaction. In some embodiments of the present disclosure, the deaminase refers to a cytidine deaminase, which catalyzes the deamination of a cytidine or a deoxycytidine to a uracil or a deoxyuridine, respectively. In other embodiments of the present disclosure, the deaminase refers to an adenosine deaminase, which catalyzes the deamination of an adenine to form hypoxanthine (in the form of its nucleoside inosine), which is read as guanine by DNA polymerase.

[0412] In some embodiments, a deaminase domain is fused to the N-terminus of the nuclease-inactivated Cas9 domain. In some embodiments, a deaminase domain is fused to the C-terminus of the nuclease-inactivated Cas9 domain. In some embodiments, a deaminase domain and a nuclease inactivated Cas9 domain are fused through a linker. A linker can be a non-functional amino acid or amino acid sequence, optionally having no secondary or higher structure, N-terminus and one or more NLSs at the C-terminus. Where there are more than one NLS, each NLS may be selected as independent from other NLSs. In some embodiments, the targeted base-editing fusion protein may comprise two NLSs, for example, the two NLSs are located at the N-terminus and the C-terminus, respectively.

[0413] In some embodiments, a targeted base modification is a conversion of any nucleotide C, A, T, or G, to any other nucleotide. Any one of a C, A, T or G nucleotide can be exchanged in a site-directed way as mediated by a base editor, or a catalytically active fragment thereof, to another nucleotide. A base editing complex can comprise any base editor, or a base editor domain or catalytically active fragment thereof, which can convert a nucleotide of interest into any other nucleotide of interest in a targeted way.

[0414] In some embodiments, a CRISPR-Cas effector protein may be temporarily or permanently linked to at least one base editor to form a targeted base editing complex, which is a base editing fusion protein, wherein the base editing complex mediates the at least one targeted base modification. A CRISPR-associated effector may be non-covalently (temporarily) or covalently (permanently) be attached to at least one base editor. Any component of the at least one base editor can be temporarily or permanently linked to the at least one CRISPR-associated effector.

[0415] In some embodiments, a base editing complex according to the present disclosure can comprise at least one cytidine deaminase, or a catalytically active fragment thereof. The at least one base editing complex can comprise the cytidine deaminase, or a domain thereof in the form of a catalytically active fragment, as base editor. In some embodiments, a base editing domain according to the present disclosure can comprise at least one adenine deaminase, or a catalytically active fragment thereof. The at least one base editing complex can comprise the adenine deaminase, or a domain thereof in the form of a catalytically active fragment, as base editor.

[0416] Any deaminase domain/polypeptide useful for base editing may be used with this invention. In some embodiments, the deaminase domain may be a cytosine deaminase domain or an adenine deaminase domain.

[0417] A cytosine deaminase (or cytidine deaminase) useful with this invention may be any known or later identified cytosine deaminase from any organism (see, e.g., U.S. Pat. No. 10,167,457 and Thuronyi et al. Nat. Biotechnol. 37:1070-1079 (2019), each of which is incorporated by reference herein for its disclosure of cytosine deaminases). In some embodiments, a cytidine deaminase comprises the wild type amino acid sequence of a cytosine deaminase. In some embodiments, the cytidine deaminase comprises one or more mutations in the cytosine deaminase sequence, such that the editing efficiency, and/or substrate editing preference of the cytosine deaminase is changed according to specific needs.

[0418] Certain mutations of APOBEC 1 and APOBEC3 proteins have been described in Kim et al., Nature Biotechnology (2017) 35(4):371-377 and Harris et al. Mol. Cell (2002) 10:1247-1253, each of which is incorporated herein by reference in its entirety. Additional cytidine deaminases are disclosed in WO2017/070632 and WO2018/213726, each of which is incorporated herein by reference in its entirety.

[0419] Cytosine deaminases can catalyze the hydrolytic deamination of cytidine or deoxycytidine to uridine or deoxyuridine, respectively. Thus, in some embodiments, a deaminase or deaminase domain useful with this invention may be a cytidine deaminase domain, catalyzing the hydrolytic deamination of cytosine to uracil. In some embodiments, a cytosine deaminase may be a variant of a naturally-occurring cytosine deaminase, including but not limited to a primate (e.g., a human, monkey, chimpanzee, gorilla), a dog, a cow, a rat or a mouse. Thus, in some embodiments, an cytosine deaminase useful with the invention may be about 70% to about 100% identical to a wild type cytosine deaminase (e.g., about 70%, 71%, 72%, 73%, 74%, 75%, 76%, 77%, 78%, 79%, 80%, 81%, 82%, 83%, 84%, 85%, 86%, 87%, 88%, 89%, 90%, 91%, 92%, 93%, 94%, 95%, 96%, 97%, 98%, 99%, or 100% identical, and any range or value therein, to a naturally occurring cytosine deaminase).

[0420] Cytidine deaminase is capable of targeting cytosine in a DNA single strand. In some embodiments, a cytodine deaminase may edit on a single strand present outside of the binding component e.g. bound Cas9 and/or Casl3. In some embodiments, a cytodine deaminase may edit at a localized bubble, such as a localized bubble formed by a mismatch at the target edit site but the guide sequence.

[0421] In some embodiments, the cytidine deaminase protein recognizes and converts one or more target cytosine residue(s) in a single-stranded bubble of a DNA-RNA heteroduplex into uracil residues (s). In some embodiments, the cytidine deaminase protein recognizes a binding window on the single-stranded bubble of a DNA-RNA heteroduplex. In some embodiments, the binding window contains at least one target cytosine residue(s). In some embodiments, the binding window is in the range of about 3 bp to about 100 bp. In some embodiments, the binding window is in the range of about 5 bp to about 50 bp. In some embodiments, the binding window is in the range of about 10 bp to about 30 bp. In some embodiments, the binding window is about 1 bp, 2 bp, 3 bp, 5 bp, 7 bp, 10 bp, 15 bp, 20 bp, 25 bp, 30 bp, 40 bp, 45 bp, 50 bp, 55 bp, 60 bp, 65 bp, 70 bp, 75 bp, 80 bp, 85 bp, 90 bp, 95 bp, or 100 bp.

[0422] In some embodiments, a cytosine deaminase useful with the invention may be an apolipoprotein B mRNA-editing complex (APOBEC) family deaminase. In some embodiments, the cytosine deaminase may be an APOBEC1 deaminase, an APOBEC2 deaminase, an APOBEC3A deaminase, an APOBEC3B deaminase, an APOBEC3C deaminase, an APOBEC3D deaminase, an APOBEC3F deaminase, an APOBEC3G deaminase, an APOBEC3H deaminase, an APOBEC4 deaminase, a human activation induced deaminase (hAID), an rAPOBEC1, FERNY, and/or a CDA1, optionally a pmCDA1, an atCDA1 (e.g., At2g19570), and evolved versions of the same (e.g., SEQ ID NO:27 or SEQ ID NO:28). In some embodiments, the cytidine deaminase comprises human APOBEC1 full protein (hAPOBECI) or the deaminase domain thereof (hAPOBECI-D) or a C-terminally truncated version thereof (hAPOBEC-T). In some embodiments, the cytidine deaminase is an APOBEC family member that is homologous to hAPOBECI, hAPOBEC-D or hAPOBEC-T. In some embodiments, the cytidine deaminase comprises human AID1 full protein (hAID) or the deaminase domain thereof (hAID-D) or a C-terminally truncated version thereof (hAID-T). In some embodiments, the cytidine deaminase is an AID family member that is homologous to hAID, hAID-D or hAID-T. In some embodiments, the hAIDT is a hAID which is C-terminally truncated by about 20 amino acids. In some embodiments, the cytosine deaminase may be an APOBEC1 deaminase. In some embodiments, the cytosine deaminase may be an APOBEC3A deaminase. In some embodiments, the cytosine deaminase may be an CDA1 deaminase. In some embodiments, the cytosine deaminase may be a FERNY deaminase. In some embodiments, the cytosine deaminase may be an APOBEC1 deaminase having the amino acid sequence of SEQ ID NO:23. In some embodiments, the cytosine deaminase may be an APOBEC3A deaminase having the amino acid sequence of SEQ ID NO:24. In some embodiments, the cytosine deaminase may be an CDA1 deaminase, optionally a CDA1 having the amino acid sequence of SEQ ID NO:25. In some embodiments, the cytosine deaminase may be a FERNY deaminase, optionally a FERNY having the amino acid sequence of SEQ ID NO:26. In some embodiments, a cytosine deaminase useful with the invention may be about 70% to about 100% identical (e.g., 70%, 71%, 72%, 73%, 74%, 75%, 76%, 77%, 78%, 79%, 80%, 81%, 82%, 83%, 84%, 85%, 86%, 87%, 88%, 89%, 90%, 91%, 92%, 93%, 94%, 95%, 96%, 97%, 98%, 99%, 99.5% or 100% identical) to the amino acid sequence of a naturally occurring cytosine deaminase (e.g., an evolved deaminase). In some embodiments, a cytosine deaminase useful with the invention may be about 70% to about 99.5% identical (e.g., about 70%, 71%, 72%, 73%, 74%, 75%, 76%, 77%, 78%, 79%, 80%, 81%, 82%, 83%, 84%, 85%, 86%, 87%, 88%, 89%, 90%, 91%, 92%, 93%, 94%, 95%, 96%, 97%, 98%, 99%, or 99.5% identical) to the amino acid sequence of SEQ ID NO:23, SEQ ID NO:24, SEQ ID NO:25 or SEQ ID NO:26 (e.g., at least 80%, at least 85%, at least 90%, at least 92%, at least 95%, at least 96%, at least 97%, at least 98%, at least 99%, or at least 99.5% identical to the amino acid sequence of SEQ ID NO:23, SEQ ID NO:24, SEQ ID NO:25, SEQ ID NO:26, SEQ ID NO:27 or SEQ ID NO:28). In some embodiments, a polynucleotide encoding a cytosine deaminase may be codon optimized for expression in a plant and the codon optimized polypeptide may be about 70% to 99.5% identical to the reference polynucleotide.

[0423] As used herein, the term “glycosylase” refers to a family of enzymes involved in base excision repair, classified under EC number EC 3.2.2. Base excision repair is the mechanism by which damaged bases in DNA are removed and replaced. DNA glycosylases catalyze the first step of this process. They remove the damaged nitrogenous base while leaving the sugar-phosphate backbone intact, creating an apurinic/apyrimidinic site, commonly referred to as an AP site. This is accomplished by removing the damaged base from the double helix followed by cleavage of the N-glycosidic bond. In some embodiments, in an expectation of affording a mutation introduction tendency different from that of deaminase and the like, a base excision reaction by hydrolysis of N-glycosidic bond of DNA, and then inducing mutation introduction in a repair process of cells may be used. In some aspects, an enzyme having cytosine-DNA glycosylase (CDG) activity or thymine-DNA glycosylase (TDG) activity may be used. In some aspects, a mutant of yeast mitochondrial uracil-DNA glycosylase (UNG 1), may be used as an enzyme that performs such base excision reaction. Nishida et al., US 2017/0321210 A1, published on Nov. 9, 2017, is incorporated by reference herein.

[0424] Base excision repair may be inhibited by molecules that bind the edited strand, block the edited base, inhibit uracil DNA glycosylase, inhibit base excision repair, protect the edited base, and/or promote fixing of the non-targeted strand. Accordingly, the use of a base excision repair (BER) inhibitor described herein can increase the editing efficiency of a cytidine deaminase that is capable of catalyzing a C to U change.

[0425] Accordingly, a nucleic acid construct of this invention may further encode a uracil glycosylase inhibitor (UGI) (e.g., uracil-DNA glycosylase inhibitor) polypeptide/domain. Thus, in some embodiments, a nucleic acid construct encoding a CRISPR-Cas effector protein and a cytosine deaminase domain (e.g., encoding a fusion protein comprising a CRISPR-Cas effector protein domain fused to a cytosine deaminase domain, and/or a CRISPR-Cas effector protein domain fused to a peptide tag or to an affinity polypeptide capable of binding a peptide tag and/or a deaminase protein domain fused to a peptide tag or to an affinity polypeptide capable of binding a peptide tag) may further encode a uracil-DNA glycosylase inhibitor (UGI), optionally wherein the UGI may be codon optimized for expression in a plant. In some embodiments, the invention provides fusion proteins comprising a CRISPR-Cas effector polypeptide, a deaminase domain, and a UGI and/or one or more polynucleotides encoding the same, optionally wherein the one or more polynucleotides may be codon optimized for expression in a plant. In some embodiments, the invention provides fusion proteins, wherein a CRISPR-Cas effector polypeptide, a deaminase domain, and a UGI may be fused to any combination of peptide tags and affinity polypeptides as described herein, thereby recruiting the deaminase domain and UGI to the CRISPR-Cas effector polypeptide and a target nucleic acid. In some embodiments, a guide nucleic acid may be linked to a recruiting RNA motif and one or more of the deaminase domain and/or UGI may be fused to an affinity polypeptide that is capable of interacting with the recruiting RNA motif, thereby recruiting the deaminase domain and UGI to a target nucleic acid.

[0426] A “uracil glycosylase inhibitor” useful with the invention may be any protein that is capable of inhibiting a uracil-DNA glycosylase base-excision repair enzyme.

[0427] Suitable uracil glycosylase inhibitor (UGI) protein and nucleotide sequences are provided herein and additional suitable UGI sequences are known to those in the art, and include, for example, those published in Wang et al. J. Biol. Chem. 264: 1 163-1 171(1989); Lundquist et al., J. Biol. Chem. 272:21408-21419(1997); Ravishankar et al. Nucleic Acids Res. 26:4880-4887(1998); and Putnam et al. J. Mol. Biol. 287:331-346(1999), each of which incorporated herein by reference. Additional embodiments of the uracil glycosylase inhibitor (UGI) are disclosed in WO2018/086623, WO2018/205995, WO2017/70632, and WO2018/213726, each of which is incorporated herein by reference in its entirety.

[0428] In some embodiments, the uracil glycosylase inhibitor is the uracil DNA glycosylase inhibitor of Bacillus subtilis bacteriophage PBS1 or an active fragment thereof, such as an 83 residue protein of Bacillus subtilis bacteriophage PBS1. In some embodiments, the UGI domain comprises a wild type UGI or a UGI. In some embodiments, the UGI proteins provided herein include fragments of UGI and proteins homologous to a UGI or a UGI fragment.

[0429] Additional proteins may be uracil glycosylase inhibitors. For example, other proteins that are capable of inhibiting (e.g., sterically blocking) a uracil-DNA glycosylase base-excision repair enzyme are within the scope of this disclosure. Additionally, any proteins that block or inhibit base-excision repair as also within the scope of this disclosure. In some embodiments, a protein that binds DNA is used. In another embodiment, a substitute for UGI is used. In some embodiments, a uracil glycosylase inhibitor is a protein that binds single-stranded DNA. For example, a uracil glycosylase inhibitor may be a Erwinia tasmaniensis single-stranded binding protein. In some embodiments, a uracil glycosylase inhibitor is a protein that binds uracil. In some embodiments, a uracil glycosylase inhibitor is a protein that binds uracil in DNA. In some embodiments, a uracil glycosylase inhibitor is a catalytically inactive uracil DNA-glycosylase protein. In some embodiments, a uracil glycosylase inhibitor is a catalytically inactive uracil DNA-glycosylase protein that does not excise uracil from the DNA. As another example, a uracil glycosylase inhibitor is a catalytically inactive UDG.

[0430] In some embodiments, a UGI domain comprises a wild type UGI or a fragment thereof. In some embodiments, a UGI domain useful with the invention may be about 70% to about 100% identical (e.g., 70%, 71%, 72%, 73%, 74%, 75%, 76%, 77%, 78%, 79%, 80%, 81%, 82%, 83%, 84%, 85%, 86%, 87%, 88%, 89%, 90%, 91%, 92%, 93%, 94%, 95%, 96%, 97%, 98%, 99%, 99.5% or 100% identical and any range or value therein) to the amino acid sequence of a naturally occurring UGI domain. In some embodiments, a UGI domain may comprise the amino acid sequence of SEQ ID NO:35or a polypeptide having about 70% to about 99.5% sequence identity to the amino acid sequence of SEQ ID NO:35 (e.g., at least 80%, at least 85%, at least 90%, at least 92%, at least 95%, at least 96%, at least 97%, at least 98%, at least 99%, or at least 99.5% identical to the amino acid sequence of SEQ ID NO:35). For example, in some embodiments, a UGI domain may comprise a fragment of the amino acid sequence of SEQ ID NO:35 that is 100% identical to a portion of consecutive nucleotides (e.g., 10, 15, 20, 25, 30, 35, 40, 45, 50, 55, 60, 65, 70, 75, 80 consecutive nucleotides; e.g., about 10, 15, 20, 25, 30, 35, 40, 45, to about 50, 55, 60, 65, 70, 75, 80 consecutive nucleotides) of the amino acid sequence of SEQ ID NO:35. In some embodiments, a UGI domain may be a variant of a known UGI (e.g., SEQ ID NO:35) having about 70% to about 99.5% sequence identity (e.g., 70%, 71%, 72%, 73%, 74%, 75%, 76%, 77%, 78%, 79%, 80%, 81%, 82%, 83%, 84%, 85%, 86%, 87%, 88%, 89%, 90%, 91%, 92%, 93%, 94%, 95%, 96%, 97%, 98%, 99%, 99.5% sequence identity, and any range or value therein) to the known UGI. In some embodiments, a polynucleotide encoding a UGI may be codon optimized for expression in a plant (e.g., a plant) and the codon optimized polypeptide may be about 70% to about 99.5% identical to the reference polynucleotide.

[0431] An adenine deaminase (or adenosine deaminase) useful with this invention may be any known or later identified adenine deaminase from any organism (see, e.g., U.S. Pat. No. 10,113,163, which is incorporated by reference herein for its disclosure of adenine deaminases). Adenosine deaminases (e.g. engineered adenosine deaminases, evolved adenosine deaminases) useful with this invention may be from any organism, such as a bacterium. In some embodiments, the deaminase or deaminase domain is a variant of a naturally-occurring deaminase from an organism. In some embodiments, the deaminase or deaminase domain does not occur in nature. For example, in some embodiments, the deaminase or deaminase domain is at least 50%, at least 55%, at least 60%, at least 65%, at least 70%, at least 75% at least 80%, at least 85%, at least 90%, at least 95%, at least 96%, at least 97%, at least 98%, at least 99%, or at least 99.5% identical to a naturally-occurring deaminase. In some embodiments, the adenosine deaminase is from a bacterium, such as, E. coli, S. aureus, S. typhi, S. putrefaciens, H. influenzae, or C. crescentus.

[0432] Adenine deaminases catalyze the hydrolytic deamination of adenine or adenosine. In some embodiments, the adenine deaminase may catalyze the hydrolytic deamination of adenosine or deoxyadenosine to inosine or deoxyinosine, respectively. In some embodiments, the adenosine deaminase may catalyze the hydrolytic deamination of adenine or adenosine in DNA. In some embodiments, an adenine deaminase encoded by a nucleic acid construct of the invention may generate an A→G conversion in the sense (e.g., “+”; template) strand of the target nucleic acid or a T→C conversion in the antisense (e.g., “−”, complementary) strand of the target nucleic acid.

[0433] In some embodiments, an adenosine deaminase may be a variant of a naturally-occurring adenine deaminase. Thus, in some embodiments, an adenosine deaminase may be about 70% to 100% identical to a wild type adenine deaminase (e.g., about 70%, 71%, 72%, 73%, 74%, 75%, 76%, 77%, 78%, 79%, 80%, 81%, 82%, 83%, 84%, 85%, 86%, 87%, 88%, 89%, 90%, 91%, 92%, 93%, 94%, 95%, 96%, 97%, 98%, 99%, or 100% identical, and any range or value therein, to a naturally occurring adenine deaminase). In some embodiments, the deaminase or deaminase does not occur in nature and may be referred to as an engineered, mutated or evolved adenosine deaminase. Thus, for example, an engineered, mutated or evolved adenine deaminase polypeptide or an adenine deaminase domain may be about 70% to 99.9% identical to a naturally occurring adenine deaminase polypeptide/domain (e.g., about 70%, 71%, 72%, 73%, 74%, 75%, 76%, 77%, 78%, 79%, 80%, 81%, 82%, 83%, 84%, 85%, 86%, 87%, 88%, 89%, 90%, 91%, 92%, 93%, 94%, 95%, 96%, 97%, 98%, 99%, 99.1%, 99.2%, 99.3%, 99.4%, 99.5%, 99.6%, 99.7%, 99.8% or 99.9% identical, and any range or value therein, to a naturally occurring adenine deaminase polypeptide or adenine deaminase domain). In some embodiments, the adenosine deaminase may be from a bacterium, (e.g., Escherichia coli, Staphylococcus aureus, Haemophilus influenzae, Caulobacter crescentus, and the like). In some embodiments, a polynucleotide encoding an adenine deaminase polypeptide/domain may be codon optimized for expression in a plant.

[0434] In some embodiments, adenosine deaminases useful with the invention include, but are not limited to, members of the enzyme family known as adenosine deaminases that act on RNA (ADARs), members of the enzyme family known as adenosine deaminases that act on tRNA (ADATs), and other adenosine deaminase domain-containing (ADAD) family members. According to the present disclosure, the adenosine deaminase is capable of targeting adenine in a RNA/DNA heteroduplex. Indeed, Zheng et al. (Nucleic Acids Res. 2017, 45(6): 3369-3377) has demonstrated that ADARs can carry out adenosine to inosine editing reactions on RNA/DNA heteroduplexes. In particular embodiments, the adenosine deaminase has been modified to increase its ability to edit DNA in a RNA/DNA heteroduplex.

[0435] In some embodiments, an adenosine deaminase may be derived from one or more metazoa species, including but not limited to, mammals, birds, frogs, squids, fish, flies and worms. In some embodiments, the adenosine deaminase is a human, squid or Drosophila adenosine deaminase. In some embodiments, the adenosine deaminase is a human ADAR, including hADARI, hADAR2, hADAR3. In some embodiments, the adenosine deaminase is a Caenorhabditis elegans ADAR protein, including ADR-1 and ADR-2. In some embodiments, the adenosine deaminase is a Drosophila ADAR protein, including dAdar. In some embodiments, the adenosine deaminase is a squid Loligo pealeii ADAR protein, including sqADAR2a and sqADAR2b. In some embodiments, the adenosine deaminase is a human ADAT protein. In some embodiments, the adenosine deaminase is a Drosophila ADAT protein. In some embodiments, the adenosine deaminase is a human ADAD protein, including TE R (hADADI) and TE RL (hADAD2). In some embodiments, the adenosine deaminase is mouse ADA (See Grunebaum et al., Curr. Opin. Allergy Clin. Immunol. 13:630-638 (2013)) or human ADAT2 (See Fukui et al., J. Nucleic Acids 2010:260512 (2010)), each of which is incorporated herein by reference in its entirety. Additional embodiments of the adenosine deaminase are disclosed in U.S. Pat. No. 10,113,163 and WO2018/213708, each of which is incorporated herein by reference in its entirety.

[0436] In some embodiments, an adenine deaminase domain may be a wild type tRNA-specific adenosine deaminase domain, e.g., a tRNA-specific adenosine deaminase (TadA) and/or a mutated/evolved adenosine deaminase domain, e.g., mutated/evolved tRNA-specific adenosine deaminase domain (TadA*). In some embodiments, a TadA domain may be from E. coli. In some embodiments, the TadA may be modified, e.g., truncated, missing one or more N-terminal and/or C-terminal amino acids relative to a full-length TadA (e.g., 1, 2, 3, 4, 5, 6, 7, 8, 9, 10, 11, 12, 13, 14, 15, 6, 17, 18, 19, or 20 N-terminal and/or C terminal amino acid residues may be missing relative to a full length TadA. In some embodiments, a TadA polypeptide or TadA domain does not comprise an N-terminal methionine. In some embodiments, a TadA polypeptide or TadA domain does not comprise an N-terminal methionine. In some embodiments, the adenosine deaminase is a TadA deaminase. In some embodiments, the TadA deaminase is an E. coli TadA deaminase (ecTadA). In some embodiments, the TadA deaminase is a truncated E. coli TadA deaminase. For example, the truncated ecTadA may be missing one or more N-terminal amino acids relative to a full-length ecTadA. In some embodiments, an adenosine deaminase is as described in Gaudelli et al. (Nat Biotechnol (2020) (doi.org/10.1038/s41587-020-0491-6)) and Richter et al. (Nat Biotechnol (2020) (doi.org/10.1038/s41587-020-0453-z)). In some embodiments, the truncated ecTadA may be missing 1, 2, 3, 4, 5, 6, 7, 8, 9, 10, 11, 12, 13, 14, 15, 6, 17, 18, 19, or 20 N-terminal amino acid residues relative to the full length ecTadA. In some embodiments, the truncated ecTadA may be missing 1, 2, 3, 4, 5, 6, 7, 8, 9, 10, 11, 12, 13, 14, 15, 6, 17, 18, 19, or 20 C-terminal amino acid residues relative to the full length ecTadA. In some embodiments, the ecTadA deaminase does not comprise an N-terminal methionine

[0437] In some embodiments, a wild type E. coli TadA comprises the amino acid sequence of SEQ ID NO:30. In some embodiments, a mutated/evolved E. coli TadA* comprises the amino acid sequence of SEQ ID NOs:31-34 (e.g., SEQ ID NOs: 31, 32, 33, or 34). In some embodiments, a polynucleotide encoding a TadA/TadA* may be codon optimized for expression in a plant.

[0438] A cytosine deaminase catalyzes cytosine deamination and results in a thymidine (through a uracil intermediate), causing a C to T conversion, or a G to A conversion in the complementary strand in the genome. Thus, in some embodiments, the cytosine deaminase encoded by the polynucleotide of the invention generates a C→T conversion in the sense (e.g., “+”; template) strand of the target nucleic acid or a G→A conversion in antisense (e.g., “−”, complementary) strand of the target nucleic acid.

[0439] In some embodiments, the adenine deaminase encoded by the nucleic acid construct of the invention generates an A→G conversion in the sense (e.g., “+”; template) strand of the target nucleic acid or a T→C conversion in the antisense (e.g., “−”, complementary) strand of the target nucleic acid.

[0440] In some aspects, methods for targeted deamination of adenine or cytidine in a target nucleic acid are provided, more particularly in a locus of interest (e.g., a gene encoding an enzyme involved in glucosinolate biosynthesis or breakdown, e.g., a myrosinase gene, a CYP79F1 gene, and/or an AOP2 gene). An adenosine deaminase (AD) protein and/or a cytidine deaminase (CD) protein may be recruited specifically to the target adenine or cytidine in the locus of interest by a CRISPR-Cas complex which can specifically bind to a target sequence. In order to achieve this, the adenosine deaminase protein and/or cytidine deaminase protein can either be covalently linked to the CRISPR-Cas enzyme or may be provided as a separate protein, but adapted so as to ensure recruitment thereof to the CRISPR-Cas complex.

[0441] In some embodiments, recruitment of an adenosine deaminase and/or cytidine deaminase to a target locus is ensured by fusing the adenosine deaminase or catalytic domain thereof and/or the cytosine deaminase or catalytic domain thereof to the CRISPR-Cas protein, which is a Cas or Cpf1 protein. Methods of generating a fusion protein from two separate proteins are known in the art and typically involve the use of spacers or linkers. The CRISPR-Cas protein can be fused to the adenosine deaminase protein or catalytic domain thereof and/or the cytosine deaminase or catalytic domain thereof on either the N- or C-terminal end thereof. In some embodiments, the CRISPR-Cas protein is a Cas or Cpf1 protein and is linked to the N-terminus of the deaminase protein or its catalytic domain.

[0442] The nucleic acid constructs of the invention encoding a base editor comprising a sequence-specific DNA binding protein and a cytosine deaminase polypeptide, and nucleic acid constructs/expression cassettes/vectors encoding the same, may be used in combination with guide nucleic acids for modifying target nucleic acid including, but not limited to, generation of C→T or G→A mutations in a target nucleic acid including, but not limited to, a plasmid sequence; generation of C→T or G→A mutations in a coding sequence to alter an amino acid identity; generation of C→T or G→A mutations in a coding sequence to generate a stop codon; generation of C→T or G→A mutations in a coding sequence to disrupt a start codon; generation of point mutations in genomic DNA to disrupt function; and/or generation of point mutations in genomic DNA to disrupt splice junctions.

[0443] The nucleic acid constructs of the invention encoding a base editor comprising a sequence-specific DNA binding protein and an adenine deaminase polypeptide, and expression cassettes and/or vectors encoding the same may be used in combination with guide nucleic acids for modifying a target nucleic acid including, but not limited to, generation of A→G or T→C mutations in a target nucleic acid including, but not limited to, a plasmid sequence; generation of A→G or T→C mutations in a coding sequence to alter an amino acid identity; generation of A→G or T→C mutations in a coding sequence to generate a stop codon; generation of A→G or T→C mutations in a coding sequence to disrupt a start codon; generation of point mutations in genomic DNA to disrupt function; and/or generation of point mutations in genomic DNA to disrupt splice junctions.

[0444] The nucleic acid constructs of the invention comprising a CRISPR-Cas effector protein or a fusion protein thereof may be used in combination with a guide RNA (gRNA, CRISPR array, CRISPR RNA, crRNA), designed to function with the encoded CRISPR-Cas effector protein or domain, to modify a target nucleic acid. A guide nucleic acid useful with this invention comprises at least one spacer sequence and at least one repeat sequence. The guide nucleic acid is capable of forming a complex with the CRISPR-Cas nuclease domain encoded and expressed by a nucleic acid construct of the invention and the spacer sequence is capable of hybridizing to a target nucleic acid, thereby guiding the complex (e.g., a CRISPR-Cas effector fusion protein (e.g., CRISPR-Cas effector domain fused to a deaminase domain and/or a CRISPR-Cas effector domain fused to a peptide tag or an affinity polypeptide to recruit a deaminase domain and optionally, a UGI) to the target nucleic acid, wherein the target nucleic acid may be modified (e.g., cleaved or edited) or modulated (e.g., modulating transcription) by the deaminase domain.

[0445] As an example, a nucleic acid construct encoding a Cas9 domain linked to a cytosine deaminase domain (e.g., fusion protein) may be used in combination with a Cas9 guide nucleic acid to modify a target nucleic acid, wherein the cytosine deaminase domain of the fusion protein deaminates a cytosine base in the target nucleic acid, thereby editing the target nucleic acid. In a further example, a nucleic acid construct encoding a Cas9 domain linked to an adenine deaminase domain (e.g., fusion protein) may be used in combination with a Cas9 guide nucleic acid to modify a target nucleic acid, wherein the adenine deaminase domain of the fusion protein deaminates an adenosine base in the target nucleic acid, thereby editing the target nucleic acid.

[0446] Likewise, a nucleic acid construct encoding a Cas12a domain (or other selected CRISPR-Cas nuclease, e.g., C2c1, C2c3, Cas12b, Cas12c, Cas12d, Cas12e, Cas13a, Cas13b, Cas13c, Cas13d, Casl, CasIB, Cas2, Cas3, Cas3′, Cas3″, Cas4, Cas5, Cas6, Cas7, Cas8, Cas9 (also known as Csnl and Csx12), Cas10, Csyl, Csy2, Csy3, Csel, Cse2, Cscl, Csc2, Csa5, Csn2, Csm2, Csm3, Csm4, Csm5, Csm6, Cmrl, Cmr3, Cmr4, Cmr5, Cmr6, Csbl, Csb2, Csb3, Csxl7, Csxl4, Csx10, Csx16, CsaX, Csx3, Csxl, Csxl5, Csfl, Csf2, Csf3, Csf4 (dinG), and/or Csf5) linked to a cytosine deaminase domain or adenine deaminase domain (e.g., fusion protein) may be used in combination with a Cas12a guide nucleic acid (or the guide nucleic acid for the other selected CRISPR-Cas nuclease) to modify a target nucleic acid, wherein the cytosine deaminase domain or adenine deaminase domain of the fusion protein deaminates a cytosine base in the target nucleic acid, thereby editing the target nucleic acid.

[0447] Also provided herein are “guide nucleic acids” (e.g., “guide RNA,” “gRNA,” “CRISPR RNA/DNA,” “CRISPR,” “crRNA” or “crDNA”) that direct a site-directed modifying polypeptide to a specific target nucleic acid sequence. A guide nucleic acid comprises a nucleic acid-targeting segment and protein-binding segment. The nucleic acid-targeting segment of guide nucleic acid comprises a nucleotide sequence that is complementary to a sequence in the target nucleic acid sequence. As such, the nucleic acid-targeting segment of a guide nucleic acid interacts with a target nucleic acid in a sequence-specific manner via hybridization (i.e., base pairing), and the nucleotide sequence of the nucleic acid-targeting segment determines the location within the target nucleic acid that the guide nucleic acid will bind. The nucleic acid-targeting segment of a guide nucleic acid can be modified (e.g., by genetic engineering) to hybridize to any desired sequence within a target nucleic acid sequence.

[0448] The protein-binding segment of a guide nucleic acid interacts with a site-directed modifying polypeptide (e.g., a Cas protein, a Cas12a protein) to form a complex. The guide nucleic acid guides the bound polypeptide to a specific nucleotide sequence within target nucleic acid via the above-described nucleic acid-targeting segment. The protein-binding segment of a guide nucleic acid comprises two stretches of nucleotides that are complementary to one another and which form a double stranded RNA duplex.

[0449] In some embodiments, a guide nucleic acid comprises two separate nucleic acid (RNA, DNA molecules. In such embodiments, each of the two nucleic acid molecules may comprise a stretch of nucleotides that are complementary to one another such that the complementary nucleotides of the two molecules hybridize to form the double-stranded nucleic acid duplex of the protein-binding segment. In some embodiments, a guide nucleic acid comprises a single guide RNA molecule (sgRNA) (e.g., a CRISPR and a tracr).

[0450] Accordingly, a “guide nucleic acid,” used herein means a nucleic acid that comprises at least one spacer sequence, which is complementary to (and hybridizes to) a target DNA (e.g., protospacer), and at least one repeat sequence (e.g., a repeat of a Type V Cas12a CRISPR-Cas system, or a fragment or portion thereof; a repeat of a Type II Cas9 CRISPR-Cas system, or fragment thereof; a repeat of a Type V C2c1 CRISPR Cas system, or a fragment thereof; a repeat of a CRISPR-Cas system of, for example, C2c3, Cas12a (also referred to as Cpf1), Cas12b, Cas12c, Cas12d, Cas12e, Cas13a, Cas13b, Cas13c, Cas13d, Casl, CasIB, Cas2, Cas3, Cas3′, Cas3″, Cas4, Cas5, Cas6, Cas7, Cas8, Cas9 (also known as Csnl and Csx12), Cas10, Csyl, Csy2, Csy3, Csel, Cse2, Cscl, Csc2, Csa5, Csn2, Csm2, Csm3, Csm4, Csm5, Csm6, Cmrl, Cmr3, Cmr4, Cmr5, Cmr6, Csbl, Csb2, Csb3, Csxl7, Csxl4, Csx10, Csx16, CsaX, Csx3, Csxl, Csxl5, Csfl, Csf2, Csf3, Csf4 (dinG), and/or Csf5, or a fragment thereof), wherein the repeat sequence may be linked to the 5′ end and/or the 3′ end of the spacer sequence. The design of a gRNA of this invention may be based on a Type I, Type II, Type III, Type IV, Type V, or Type VI CRISPR-Cas system.

[0451] In some embodiments, a targeted editing system (e.g., base-editing system) comprises one or two or more gRNA molecules each comprising a DNA-binding segment, wherein at least one of the nucleic acid binding segments binds to a target DNA sequence of a target gene encoding a glucosinolate biosynthetic enzyme or an enzyme that breaks down or catabolizes glucosinolates (e.g., myrosinase, AOP2, and CYP79F1) may be used to produce plants of the present disclosure. In some embodiments, the guide RNA is a single guide RNA (sgRNA). Methods of constructing suitable sgRNAs according to a given target sequence are known in the art. See e.g., Wang, Y. et al. Simultaneous editing of three homoeoalleles in hexaploid bread wheat confers heritable resistance to powdery mildew. Nat. Biotechnol. 32, 947-951 (2014); Shan, Q. et al. Targeted genome modification of crop plants using a CRISPR-Cas system. Nat. Biotechnol. 31, 686-688 (2013); Liang, Z. et al. Targeted mutagenesis in Zea mays using TALENs and the CRISPR/Cas system. J Genet Genomics. 41, 63-68 (2014).

[0452] In some embodiments, a Cas12a guide nucleic acid may comprise, from 5′ to 3′, a repeat sequence (full length or portion thereof (“handle”); e.g., pseudoknot-like structure) and a spacer sequence.

[0453] In some embodiments, a guide nucleic acid may comprise more than one repeat sequence-spacer sequence (e.g., 2, 3, 4, 5, 6, 7, 8, 9, 10, or more repeat-spacer sequences) (e.g., repeat-spacer-repeat, e.g., repeat-spacer-repeat-spacer-repeat-spacer-repeat-spacer-repeat-spacer, and the like). The guide nucleic acids of this invention are synthetic, human-made and not found in nature. A guide nucleic acid can be quite long and may be used as an aptamer (like in the MS2 recruitment strategy) or other RNA structures hanging off the spacer.

[0454] A “repeat sequence” as used herein, refers to, for example, any repeat sequence of a wild-type CRISPR Cas locus (e.g., a Cas9 locus, a Cas12a locus, a C2c1 locus, etc.) or a repeat sequence of a synthetic crRNA that is functional with the CRISPR-Cas effector protein encoded by the nucleic acid constructs of the invention. A repeat sequence useful with this invention can be any known or later identified repeat sequence of a CRISPR-Cas locus (e.g., Type I, Type II, Type III, Type IV, Type V or Type VI) or it can be a synthetic repeat designed to function in a Type I, II, Ill, IV, V or VI CRISPR-Cas system. A repeat sequence may comprise a hairpin structure and/or a stem loop structure. In some embodiments, a repeat sequence may form a pseudoknot-like structure at its 5′ end (i.e., “handle”). Thus, in some embodiments, a repeat sequence can be identical to or substantially identical to a repeat sequence from wild-type Type I CRISPR-Cas loci, Type II, CRISPR-Cas loci, Type III, CRISPR-Cas loci, Type IV CRISPR-Cas loci, Type V CRISPR-Cas loci and/or Type VI CRISPR-Cas loci. A repeat sequence from a wild-type CRISPR-Cas locus may be determined through established algorithms, such as using the CRISPRfinder offered through CRISPRdb (see, Grissa et al. Nucleic Acids Res. 35(Web Server issue):W52-7). In some embodiments, a repeat sequence or portion thereof is linked at its 3′ end to the 5′ end of a spacer sequence, thereby forming a repeat-spacer sequence (e.g., guide nucleic acid, guide RNA/DNA, crRNA, crDNA).

[0455] In some embodiments, a repeat sequence comprises, consists essentially of, or consists of at least 10 nucleotides depending on the particular repeat and whether the guide nucleic acid comprising the repeat is processed or unprocessed (e.g., about 10, 11, 12, 13, 14, 15, 16, 17, 18, 19, 20, 21, 22, 23, 24, 25, 26, 27, 28, 29, 30, 31, 32, 33, 34, 35, 36, 37, 38, 39, 40, 41, 42, 43, 44, 45, 46, 47, 48, 49, 50 to 100 or more nucleotides, or any range or value therein). In some embodiments, a repeat sequence comprises, consists essentially of, or consists of about 10 to about 20, about 10 to about 30, about 10 to about 45, about 10 to about 50, about 15 to about 30, about 15 to about 40, about 15 to about 45, about 15 to about 50, about 20 to about 30, about 20 to about 40, about 20 to about 50, about 30 to about 40, about 40 to about 80, about 50 to about 100 or more nucleotides.

[0456] A repeat sequence linked to the 5′ end of a spacer sequence can comprise a portion of a repeat sequence (e.g., 5, 6, 7, 8, 9, 10, 11, 12, 13, 14, 15, 16, 17, 18, 19, 20, 21, 22, 23, 24, 25, 26, 27, 28, 29, 30, 31, 32, 33, 34, 35 or more contiguous nucleotides of a wild type repeat sequence). In some embodiments, a portion of a repeat sequence linked to the 5′ end of a spacer sequence can be about five to about ten consecutive nucleotides in length (e.g., about 5, 6, 7, 8, 9, 10 nucleotides) and have at least 90% sequence identity (e.g., at least about 90%, 91%, 92%, 93%, 94%, 95%, 96%, 97%, 98%, 99%, or more (e.g., 99.1, 99.2, 99.3, 99.4, 99.5, 99.6, 99.7, 99.8, 99.9, or 100%)) to the same region (e.g., 5′ end) of a wild type CRISPR Cas repeat nucleotide sequence. In some embodiments, a portion of a repeat sequence may comprises a pseudoknot-like structure at its 5′ end (e.g., “handle”).

[0457] A “spacer sequence” as used herein is a nucleotide sequence that is complementary to a target nucleic acid (e.g., target DNA) (e.g, protospacer) (e.g., consecutive nucleotides of a myrosinase gene, a CYP79F1 gene or an AOP2 gene. In some embodiments, a spacer sequence useful with this invention may be complementary to a sequence (or portion thereof) having at least 80% sequence identity to any one of the nucleotide sequences of SEQ ID NOs:66-92, SEQ ID NO:113, SEQ ID NO:114, SEQ ID NOs:118-127 or SEQ ID NOs:680-742; or complementary to a portion of consecutive nucleotides encoding a sequence having at least 80% sequenced identity to any one of the amino acid sequences of SEQ ID NOs:93-105, 115, 128-132, 617-679 or 743-786. In some embodiments, a spacer sequence may include, but is not limited to, a sequence having at least 80% identity to any one of the nucleotide sequences of SEQ ID NO:116 or SEQ ID NO:117, SEQ ID NOs:133-140 and/or SEQ ID NOs:106-112.

[0458] The specificity of a guide nucleic acid for a target loci is mediated by the sequence of the nucleic acid-binding segment (e.g., a spacer sequence), which comprises a sequence that is complementary to a target nucleic acid sequence within the target locus. The spacer sequence can be fully complementary or substantially complementary (e.g., at least about 70% complementary (e.g., about 70%, 71%, 72%, 73%, 74%, 75%, 76%, 77%, 78%, 79%, 80%, 81%, 82%, 83%, 84%, 85%, 86%, 87%, 88%, 89%, 90%, 91%, 92%, 93%, 94%, 95%, 96%, 97%, 98%, 99%, or more (e.g., 99.1, 99.2, 99.3, 99.4, 99.5, 99.6, 99.7, 99.8, 99.9, or 100%)) to a target nucleic acid. Thus, in some embodiments, the spacer sequence can have one, two, three, four, or five mismatches as compared to the target nucleic acid, which mismatches can be contiguous or noncontiguous. In some embodiments, the spacer sequence can have 70% complementarity to a target nucleic acid. In other embodiments, the spacer nucleotide sequence can have 80% complementarity to a target nucleic acid. In still other embodiments, the spacer nucleotide sequence can have 85%, 90%, 95%, 96%, 97%, 98%, 99% or 99.5% complementarity, and the like, to the target nucleic acid (protospacer). In some embodiments, the spacer sequence is 100% complementary to the target nucleic acid. A spacer sequence may have a length from about 15 nucleotides to about 30 nucleotides (e.g., 15, 16, 17, 18, 19, 20, 21, 22, 23, 24, 25, 26, 27, 28, 29, or 30 nucleotides, or any range or value therein). Thus, in some embodiments, a spacer sequence may have complete complementarity or substantial complementarity over a region of a target nucleic acid (e.g., protospacer) that is at least about 15 nucleotides to about 30 nucleotides in length. In some embodiments, the spacer is about 20 nucleotides in length. In some embodiments, the spacer is about 21, 22, or 23 nucleotides in length.

[0459] In some embodiments, the 5′ region of a spacer sequence of a guide nucleic acid may be identical to a target DNA, while the 3′ region of the spacer may be substantially complementary to the target DNA (e.g., Type V CRISPR-Cas), or the 3′ region of a spacer sequence of a guide nucleic acid may be identical to a target DNA, while the 5′ region of the spacer may be substantially complementary to the target DNA (e.g., Type II CRISPR-Cas), and therefore, the overall complementarity of the spacer sequence to the target DNA may be less than 100%. Thus, for example, in a guide for a Type V CRISPR-Cas system, the first 1, 2, 3, 4, 5, 6, 7, 8, 9, 10 nucleotides in the 5′ region (i.e., seed region) of, for example, a 20 nucleotide spacer sequence may be 100% complementary to the target DNA, while the remaining nucleotides in the 3′ region of the spacer sequence are substantially complementary (e.g., at least about 70% complementary) to the target DNA. In some embodiments, the first 1 to 8 nucleotides (e.g., the first 1, 2, 3, 4, 5, 6, 7, 8, nucleotides, and any range therein) of the 5′ end of the spacer sequence may be 100% complementary to the target DNA, while the remaining nucleotides in the 3′ region of the spacer sequence are substantially complementary (e.g., at least about 50% complementary (e.g., 50%, 55%, 60%, 65%, 70%, 71%, 72%, 73%, 74%, 75%, 76%, 77%, 78%, 79%, 80%, 81%, 82%, 83%, 84%, 85%, 86%, 87%, 88%, 89%, 90%, 91%, 92%, 93%, 94%, 95%, 96%, 97%, 98%, 99%, or more)) to the target DNA.

[0460] As a further example, in a guide for a Type II CRISPR-Cas system, the first 1, 2, 3, 4, 5, 6, 7, 8, 9, 10 nucleotides in the 3′ region (i.e., seed region) of, for example, a 20 nucleotide spacer sequence may be 100% complementary to the target DNA, while the remaining nucleotides in the 5′ region of the spacer sequence are substantially complementary (e.g., at least about 70% complementary) to the target DNA. In some embodiments, the first 1 to 10 nucleotides (e.g., the first 1, 2, 3, 4, 5, 6, 7, 8, 9, 10 nucleotides, and any range therein) of the 3′ end of the spacer sequence may be 100% complementary to the target DNA, while the remaining nucleotides in the 5′ region of the spacer sequence are substantially complementary (e.g., at least about 50% complementary (e.g., at least about 50%, 55%, 60%, 65%, 70%, 71%, 72%, 73%, 74%, 75%, 76%, 77%, 78%, 79%, 80%, 81%, 82%, 83%, 84%, 85%, 86%, 87%, 88%, 89%, 90%, 91%, 92%, 93%, 94%, 95%, 96%, 97%, 98%, 99%, or more or any range or value therein)) to the target DNA.

[0461] In some embodiments, a seed region of a spacer may be about 8 to about 10 nucleotides in length, about 5 to about 6 nucleotides in length, or about 6 nucleotides in length.

[0462] The term “tracrRNA” refers to a small trans-encoded RNA. TracrRNA is complementary to and base pairs with crRNA to form a crRNA/tracrRNA hybrid, capable of recruiting CRISPR endonucleases and/or CRISPR-associated effectors to target sequences.

[0463] As used herein, a “target nucleic acid”, “target DNA,” “target, RNA,” “target nucleotide sequence,” “target region,” or a “target region in the genome” refers to a region of a plant's genome that is fully complementary (100% complementary) or substantially complementary (e.g., at least 70% complementary (e.g., 70%, 71%, 72%, 73%, 74%, 75%, 76%, 77%, 78%, 79%, 80%, 81%, 82%, 83%, 84%, 85%, 86%, 87%, 88%, 89%, 90%, 91%, 92%, 93%, 94%, 95%, 96%, 97%, 98%, 99%, or more)) to a spacer sequence in a guide nucleic acid of this invention. A target region useful for a CRISPR-Cas system may be located immediately 3′ (e.g., Type V CRISPR-Cas system) or immediately 5′ (e.g., Type II CRISPR-Cas system) to a PAM sequence in the genome of the organism (e.g., a plant genome). A target region may be selected from any region of at least 15 consecutive nucleotides (e.g., 16, 17, 18, 19, 20, 21, 22, 23, 24, 25, 26, 27, 28, 29, 30 nucleotides, and the like) located immediately adjacent to a PAM sequence. In some embodiments, the target nucleic acid sequence is an RNA target sequence. In some embodiments, the target nucleic acid sequence is a DNA target sequence.

[0464] A “protospacer sequence” refers to the target double stranded DNA and specifically to the portion of the target DNA (e.g., or target region in the genome) that is fully or substantially complementary (and hybridizes) to the spacer sequence of the CRISPR repeat-spacer sequences (e.g., guide nucleic acids, CRISPR arrays, crRNAs).

[0465] In the case of Type V CRISPR-Cas (e.g., Cas12a) systems and Type II CRISPR-Cas (Cas9) systems, the protospacer sequence is flanked by (e.g., immediately adjacent to) a protospacer adjacent motif (PAM). For Type IV CRISPR-Cas systems, the PAM is located at the 5′ end on the non-target strand and at the 3′ end of the target strand (see below, as an example).

```
        5′-NNNNNNNNNNNNNNNNNNN-3′ RNA Spacer (SEQ ID NO: 36)
                | ||||| | |||||||||||||
3′AAANNNNNNNNNNNNNNNNNNN-5′ Target strand (SEQ ID NO: 37)
    ||||
5′TTTNNNNNNNNNNNNNNNNNNN-3′ Non-target strand (SEQ ID NO: 38)
```

[0466] In the case of Type II CRISPR-Cas (e.g., Cas9) systems, the PAM is located immediately 3′ of the target region. The PAM for Type I CRISPR-Cas systems is located 5′ of the target strand. There is no known PAM for Type III CRISPR-Cas systems. Makarova et al. describes the nomenclature for all the classes, types and subtypes of CRISPR systems (Nature Reviews Microbiology 13:722-736 (2015)). Guide structures and PAMs are described in by R. Barrangou (Genome Biol. 16:247 (2015)).

[0467] Canonical Cas12a PAMs are T rich. In some embodiments, a canonical Cas12a PAM sequence may be 5′-TTN, 5′-TTTN, or 5′-TTTV. In some embodiments, canonical Cas9 (e.g., S. pyogenes) PAMs may be 5-NGG-3′. In some embodiments, non-canonical PAMs may be used but may be less efficient.

[0468] Additional PAM sequences may be determined by those skilled in the art through established experimental and computational approaches. Thus, for example, experimental approaches include targeting a sequence flanked by all possible nucleotide sequences and identifying sequence members that do not undergo targeting, such as through the transformation of target plasmid DNA (Esvelt et al. 2013. Nat. Methods 10:1116-1121; Jiang et al. 2013. Nat. Biotechnol. 31:233-239). In some aspects, a computational approach can include performing BLAST searches of natural spacers to identify the original target DNA sequences in bacteriophages or plasmids and aligning these sequences to determine conserved sequences adjacent to the target sequence (Briner and Barrangou. 2014. Appl. Environ. Microbiol. 80:994-1001; Mojica et al. 2009. Microbiology 155:733-740).

[0469] In some embodiments, the present invention provides expression cassettes and/or vectors comprising the nucleic acid constructs of the invention (e.g, one or more components of an editing system of the invention). In some embodiments, expression cassettes and/or vectors comprising the nucleic acid constructs of the invention and/or one or more guide nucleic acids may be provided. In some embodiments, a nucleic acid construct of the invention encoding a base editor (e.g., a construct comprising a CRISPR-Cas effector protein and a deaminase domain (e.g., a fusion protein)) or the components for base editing (e.g., a CRISPR-Cas effector protein fused to a peptide tag or an affinity polypeptide, a deaminase domain fused to a peptide tag or an affinity polypeptide, and/or a UGI fused to a peptide tag or an affinity polypeptide), may be comprised on the same or on a separate expression cassette or vector from that comprising the one or more guide nucleic acids. When the nucleic acid construct encoding a base editor or the components for base editing is/are comprised on separate expression cassette(s) or vector(s) from that comprising the guide nucleic acid, a target nucleic acid may be contacted with (e.g., provided with) the expression cassette(s) or vector(s) encoding the base editor or components for base editing in any order from one another and the guide nucleic acid, e.g., prior to, concurrently with, or after the expression cassette comprising the guide nucleic acid is provided (e.g., contacted with the target nucleic acid).

[0470] Fusion proteins of the invention may comprise sequence-specific DNA binding domains, CRISPR-Cas polypeptides, and/or deaminase domains fused to peptide tags or affinity polypeptides that interact with the peptide tags, as known in the art, for use in recruiting the deaminase to the target nucleic acid. Methods of recruiting may also comprise guide nucleic acids linked to RNA recruiting motifs and deaminases fused to affinity polypeptides capable of interacting with RNA recruiting motifs, thereby recruiting the deaminase to the target nucleic acid. Alternatively, chemical interactions may be used to recruit polypeptides (e.g., deaminases) to a target nucleic acid.

[0471] A peptide tag (e.g., epitope) useful with this invention may include, but is not limited to, a GCN4 peptide tag (e.g., Sun-Tag), a c-Myc affinity tag, an HA affinity tag, a His affinity tag, an S affinity tag, a methionine-His affinity tag, an RGD-His affinity tag, a FLAG octapeptide, a strep tag or strep tag II, a V5 tag, and/or a VSV-G epitope. Any epitope that may be linked to a polypeptide and for which there is a corresponding affinity polypeptide that may be linked to another polypeptide may be used with this invention as a peptide tag. In some embodiments, a peptide tag may comprise 1 or 2 or more copies of a peptide tag (e.g., repeat unit, multimerized epitope (e.g., tandem repeats)) (e.g., 1, 2, 3, 4, 5, 6, 7, 8, 9, 10, 11, 12, 13, 14, 15, 16, 17, 18, 19, 20, 21, 22, 23, 24, 25 or more repeat units. In some embodiments, an affinity polypeptide that interacts with/binds to a peptide tag may be an antibody. In some embodiments, the antibody may be a scFv antibody. In some embodiments, an affinity polypeptide that binds to a peptide tag may be synthetic (e.g., evolved for affinity interaction) including, but not limited to, an affibody, an anticalin, a monobody and/or a DARPin (see, e.g., Sha et al., Protein Sci. 26(5):910-924 (2017)); Gilbreth (Curr Opin Struc Biol 22(4):413-420 (2013)), U.S. Pat. No. 9,982,053, each of which are incorporated by reference in their entireties for the teachings relevant to affibodies, anticalins, monobodies and/or DARPins. Example peptide tags include but are not limited to SEQ ID NOs:39-41.

[0472] In some embodiments, a guide nucleic acid may be linked to an RNA recruiting motif, and a polypeptide to be recruited (e.g., a deaminase) may be fused to an affinity polypeptide that binds to the RNA recruiting motif, wherein the guide binds to the target nucleic acid and the RNA recruiting motif binds to the affinity polypeptide, thereby recruiting the polypeptide to the guide and contacting the target nucleic acid with the polypeptide (e.g., deaminase). In some embodiments, two or more polypeptides may be recruited to a guide nucleic acid, thereby contacting the target nucleic acid with two or more polypeptides (e.g., deaminases).

[0473] In some embodiments, a polypeptide fused to an affinity polypeptide may be a reverse transcriptase and the guide nucleic acid may be an extended guide nucleic acid linked to an RNA recruiting motif. In some embodiments, an RNA recruiting motif may be located on the 3′ end of the extended portion of an extended guide nucleic acid (e.g., 5′-3′, repeat-spacer-extended portion (RT template-primer binding site)-RNA recruiting motif). In some embodiments, an RNA recruiting motif may be embedded in the extended portion.

[0474] In some embodiments of the invention, an extended guide RNA and/or guide RNA may be linked to one or to two or more RNA recruiting motifs (e.g., 1, 2, 3, 4, 5, 6, 7, 8, 9, 10 or more motifs; e.g., at least 10 to about 25 motifs), optionally wherein the two or more RNA recruiting motifs may be the same RNA recruiting motif or different RNA recruiting motifs. In some embodiments, an RNA recruiting motif and corresponding affinity polypeptide may include, but is not limited, to a telomerase Ku binding motif (e.g., Ku binding hairpin) and the corresponding affinity polypeptide Ku (e.g., Ku heterodimer), a telomerase Sm7 binding motif and the corresponding affinity polypeptide Sm7, an MS2 phage operator stem-loop and the corresponding affinity polypeptide MS2 Coat Protein (MCP), a PP7 phage operator stem-loop and the corresponding affinity polypeptide PP7 Coat Protein (PCP), an SfMu phage Com stem-loop and the corresponding affinity polypeptide Com RNA binding protein, a PUF binding site (PBS) and the affinity polypeptide Pumilio/fem-3 mRNA binding factor (PUF), and/or a synthetic RNA-aptamer and the aptamer ligand as the corresponding affinity polypeptide. In some embodiments, the RNA recruiting motif and corresponding affinity polypeptide may be an MS2 phage operator stem-loop and the affinity polypeptide MS2 Coat Protein (MCP). In some embodiments, the RNA recruiting motif and corresponding affinity polypeptide may be a PUF binding site (PBS) and the affinity polypeptide Pumilio/fem-3 mRNA binding factor (PUF). Example recruiting motifs include but are not limited to SEQ ID NOs:42-52.

[0475] In some embodiments, the components for recruiting polypeptides and nucleic acids may those that function through chemical interactions that may include, but are not limited to, rapamycin-inducible dimerization of FRB — FKBP; Biotin-streptavidin; SNAP tag; Halo tag; CLIP tag; DmrA-DmrC heterodimer induced by a compound; bifunctional ligand (e.g., fusion of two protein-binding chemicals together; e.g. dihyrofolate reductase (DHFR).

[0476] In some embodiments, the nucleic acid constructs, expression cassettes or vectors of the invention that are optimized for expression in a plant may be about 70% to 100% identical (e.g., about 70%, 71%, 72%, 73%, 74%, 75%, 76%, 77%, 78%, 79%, 80%, 81%, 82%, 83%, 84%, 85%, 86%, 87%, 88%, 89%, 90%, 91%, 92%, 93%, 94%, 95%, 96%, 97%, 98%, 99%, 99.5% or 100%) to the nucleic acid constructs, expression cassettes or vectors comprising the same polynucleotide(s) but which have not been codon optimized for expression in a plant.

[0477] Further provided herein are cells comprising one or more polynucleotides, guide nucleic acids, nucleic acid constructs, expression cassettes or vectors of the invention.

[0478] The invention will now be described with reference to the following examples. It should be appreciated that these examples are not intended to limit the scope of the claims to the invention, but are rather intended to be exemplary of certain embodiments. Any variations in the exemplified methods that occur to the skilled artisan are intended to fall within the scope of the invention.

### EXAMPLES

[0479] The following examples are given for the purpose of illustrating various embodiments of the disclosure and are not meant to limit the present disclosure in any fashion. Changes therein and other uses which are encompassed within the spirit of the disclosure, as defined by the scope of the claims, will occur to those skilled in the art.

### Example 1

### Identification of Myrosinases and MYB Transcription Factors in B. juncea

[0480] The genome assembly version v1.5 and gene annotation of Brassica juncea was downloaded from Brassica Database (BRAD, brassicadb.org/brad/) and utilized for genomic analyses. In addition, Arabidopsis thaliana genome (assembly version TAIR10) from Phytozome Database and the genomic progenitors of B. juncea—Brassica rapa and Brassica nigra—from BRAD were used for comparative analyses.

[0481] First, we conducted ortholog inference of myrosinase, AOP2, and CYP79F1 in B. juncea using a gene family phylogenetics analysis, which utilized the predicted gene models from the respective genome annotations. We queried the species' proteomes—based on predicted gene models in the genome annotations — with the protein-coding sequences from the A. thaliana gene identifiers from Table 1 using Blast (blastp Version 2.5.0; parameters: ‘-seg no -max hsps 1 -max_target_seqs 40 -use_sw_tback’) and extracted protein sequence Blast hits with passing the E value<1e-10 cutoff. A second iteration of the Blast search was performed using the all passing Blast hits as query sequences, in order to generate reciprocal E value scores, which were used in clustering. Clustering was performed with the program hcluster_sg (Li H. Constructing the TreeFam database. PhD thesis, Chinese Academy of Sciences Beijing. 2006; Ver. 0.5.1, parameters: “-m 750 -w 0 -s 0.34”). Sequences were aligned using the multiple sequence alignment program T-Coffee with default parameter settings (Notredame et al. 2000. T-Coffee: A novel method for multiple sequence alignments. JMB,302(205-217) DOI: 10.1006/jmbi.2000.4042; Version_11.00.8cbe486). For phylogenetic tree reconstruction, we used ModelFinder for substitution model selection (Kalyaanamoorthy et al. (2017) ModelFinder: Fast model selection for accurate phylogenetic estimates. Nat. Methods, 14:587-589) and IQ-Tree for tree inference and branch support estimation with ultrafast bootstrap approximation (Hoang et al. (2018) UFBoot2: Improving the ultrafast bootstrap approximation. Mol. Biol. Evol., 35:518-522, Nguyen et al. Mol. Biol. Evol., 32:268-274 (2015); IQ-Tree Version 1.5.5; parameters: “-bb 1000”) using DNA coding sequences after back translation with the tranalign software tool from the EMBOSS package (Rice et al. EMBOSS: The European Molecular Biology Open Software Suite. (2000). Trends in Genetics 16, (6) pp276-277; Ver. 6.6.0.0). Orthologs of AOP2 and CYP79F1 were found by examining the tree topology and identification gene clustering from multiple species for which the most common ancestor node is a speciation event. However, this analysis did not identify orthologs from myrosinase genes in B. juncea. This analysis relies on predicted gene models in the genome annotation, any unannotated genes would be undiscoverable. Given this limitation, a Blast search was conducted on the whole genome assembly with the myrosinase gene IDs from Table 1. Blast search results were filtered to retain sequence hits at least 70% query coverage and E value<1e-10. Phylogenetic analysis was then performed in Geneious® (Version 2020.1.2) using Clustal Omega (Sievers & Higgins (2018) Clustal Omega for making accurate alignments of many protein sciences. Protein Sci 27:135-145) for sequence alignment and neighbor joining methodology for tree inference. Orthologs of myrosinase were found by examining the tree topology and identification gene clustering from multiple species for which the most common ancestor node is a speciation event. Manual annotation of the resulting genes was performed using visual examination of NGS short read and long read alignments to the genome assembly (NCBI datasets: SRP064721, SRP137085, SRP041526). Gene sequence polishing was done using visual examination of next generation short (NGS) short read alignments to the genome assembly (NCBI datasets: SRP058895).

TABLE 1
Gene IDs used for queries

| | Arabidopsis | | |
|---|---|---|---|
| Gene Name | Gene ID | Brassica rapa gene ID | Brassica nigra gene ID |
| TGG1/ | AT5G26000 | Bra020523, Bra020549, | BniB006711, BniB006713, |
| Myrosinase | | Bra032343 | BniB009758, BniB014275 |
| AOP2 | AT4G03050 | Bra034180 | BniB044970, BniB042223 |
| CYP79F1 | AT1G16410 | Bra026058 | BniB043181 |

### Example 2

### Gene-Editing of Plants

[0482] Disarmed Agrobacterium tumefaciens was used to introduce a T-DNA cassette expressing a selectable marker and CRISPR Cas gene editing components targeted to create double-strand breaks in myrosinase, AOP2 or CYP79F1 gene coding sequences. The T-DNA further expressed crRNAs programmed to target Brassica juncea (L.) myrosinase, AOP2 or CYP79F1 enzyme coding genes. PCR and next generation sequencing were used to confirm that intended genetic changes were achieved. Genomic DNA was isolated from leaf tissue and used as a template in PCR reactions using primers specific to the genes targeted. The amplified products were subsequently sequenced and characterized to confirm the genetic changes. Events of interest were advanced and progeny selected from the segregating population. SEQ ID NOs:141-599 provide some examples of mutations achieved using the editing systems as described herein. Table 2 (see end of Examples) provides each of the example edits along with plant identification no (CEID), the relevant edited locus, the cultivar, the and the allele edit percent. SEQ ID NOs: 679-741 are the cultivar wild-type genomic (cDNA) sequences for each locus. As can be seen a wide variety of edits were achieved. The plants comprising the mutations/edits provided in Table 2 (end of Examples) are non-pungent or reduced in pungency. Table 5 (end of Examples) provides the wild type sequence for each targeted locus in the Brassica juncea varieties of Green Wave, Red Giant and Southern Giant Curl.

### Myrosinase Path

[0483] Lead E0 candidate events were first identified by cross comparative taste evaluations to wild-type and other edited E0 material. Lead E0 candidates were characterized by a consensus non-pungent taste assessment call across a total of three researchers. These edited events were subsequently vegetatively propagated and evaluated at a later date with a quantitative myrosinase activity assay via the measurement of glucose release as a result of hydrolysis of exogenously supplied sinigrin to leaf extracts. Seeds were harvested from the lead E0 events and a large E1 progeny screening was deployed to assess the heritability of the trait and to aid in the association of underlying loci to the biochemical evaluation of the trait. E1 progeny were sampled at multiple time points for cross-comparative assessments of glucose release activity to identify candidates to continue forward on a product development path.

### AOP2 Path

[0484] Lead non pungent E0 events (CE35423 and CE34664) were identified by cross comparative taste evaluations to wild-type and other edited material. In a subsequent composition analysis, leaf material was harvested from the lead event, lyophilized and evaluated with HPLC for determination of glucosinolate composition. In accordance with the observation of non-pungency of the plant material upon consumption of fresh tissue, a reduction of sinigrin concentration was observed in comparison to other edited plants exhibiting mild pungency and wild-type plant material (Table 3). Accordingly, sinigrin is the glucosinolate precursor to the pungent breakdown product of allyl isothiocyanate subsequent to the hydrolysis by myrosinase enzymes; supporting the sensory observation of reduced pungency in CE35423 and CE34664.

TABLE 3
Comparison of sinigrin concentration and
pungency of edited and wild type plants

| | | Average Sinigrin |
|---|---|---|
| CE-ID | Taste | (mg/g) |
| CE34664 | non-pungent | 1.1 |
| CE35422 | mild pungent | 13.18 |
| CE35423 | non-pungent | 2.91 |
| CE36443 | mild pungent | 11.98 |
| WT | pungent | 18.95 |

### Example 3

### Functional Analysis of Edited Plants

[0485] Glucose is released as a product of the hydrolysis reaction of myrosinase with glucosinolate substrate. A relatively simple assay can be used to quantify the emittance of glucose as a rapid indicator of myrosinase activity as reported by Dosz et al., J Agric Food Chem. 62(32):8094-100 (2014)). As a control, myrosinase activity was tested via colorimetric detection of glucose as shown in FIG. 7 and FIG. 8. A range of glucose detection was prepared by evaluating a standard curve of various glucose concentrations. To demonstrate that released glucose was resultant from an endogenous myrosinase/glucosinolate reaction system, leaf material (mustard) naturally containing the enzymatic system were compared with leaf material (soy) which lacks the reaction capabilities.

[0486] Once the transformed plants were confirmed with intended disruption of myrosinases to reduce pungency and/or reduced bitterness in mustard greens, the colorimetric detection assay was used for cross-comparative analyses to characterize events of interest in relation to their levels of detectable myrosinase activities. Additional plant species may be pursued with similar in planta editing strategies to alter flavor/odor profiles in desirable consumer crops of interest (i.e. radish, broccoli, cauliflower, and papaya). This approach can be a rapid path for gathering additional functional evidence to extend this opportunity beyond mustard greens.

[0487] Table 4 (see, end of Examples) provides the phenotypic data (glucose release assay) for the edited plants and the results of the glucose release assay in the wild type.

### Example 4

### Glucosinolate Profiles of Edited Plants

[0488] Glucosinolate profiles were completed by extraction of glucosinolates followed by HPLC analysis. Glucosinolates were extracted from fresh tissue that had been fully dried by lyophilization. For each sample about 1-10 g of tissue was lyophilized. The lyophilized tissue was ground into a fine, uniform powder and 0.1 g was weighed out for each sample. To the 0.1 g of ground lyophilized tissue, 25 ml of boiling water was added and the mixture was boiled for 10 minutes before incubating at 70° C. for 4 hours. The samples were then centrifuged, and the remaining supernatant was then subjected to HPLC analysis. Table 3 provides phenotypic data (sinigrin content) for plants edited at the AOP2 locus and a wild-type control of the same cultivar.

### Example 5

### Statistical Modeling for the Association of Edited Myrosinase Loci and Corresponding Effects on Glucosinolate Metabolism in Leaf Tissues

[0489] The molecular data for each myrosinase locus and E0 generation plant was summarized to a label of “Edit” when for any guide spacer alignment regions within the locus for a plant had over 5% non-wild type read alignments. A label of “WT” (Wldtype) was given to all loci within E0 plants that did not meet the stated requirement but had over 100 reads that mapped to at least one of the spacer alignment regions within a locus. A label of “Insufficient Reads” was applied to all loci within a plant that did not have at least 100 reads that mapped to at least one of the spacer alignment regions within the locus.

[0490] The summarized call for each locus for an E0 plant was then paired with the associated quantitative glucose release assay absorbance value (GRA) measured on leaf sample collected from the same E0 plant. Lower GRA values are validated to be associated with lower myrosinase expression in the plant. Therefore, if a molecularly edited myrosinase locus is associated with lower GRA values, it can be inferred that the edited locus is also associated with less myrosinase activity in the plant.

[0491] In this study, all data that had a label of “Insufficient Reads” were removed from the analysis. The final data set consisted of between 23 and 31 datapoints for 11 loci (A01.1, A02.1, A02.2, A03.1, A09.1, B04_c11.1, B04_c11.2, B04_c11.3, B04_c11.4, B04_c12.1, B07.1) from a set of 27 unique edited E0 plants and 2 replicates of unedited Red Giant and Southern Giant Curled control material. The mean and standard error of the GRA score was computed for each locus. A 2-sample t-test was conducted for each locus and a Hochberg multiple testing correction was utilized since it is valid for non-negatively associated tests Each of the 11 loci were positively correlated with functional myrosinase activity in leaf tissue as quantitatively assessed by the hydrolysis of exogenously supplied sinigrin.

TABLE 2
Edited Plants

| | | | | EDITED | |
|---|---|---|---|---|---|
| | | | | SEQ ID | ALLELE EDIT |
| PLANT | GENE | LOCUS | CULTIVAR | NO | PERCENTAGE |
| CE15785_S25 | Myrosinase | A09.1 | Red Giant | 141 | 0.5 |
| CE15785_S25 | Myrosinase | A09.1 | Red Giant | 142 | 1.94 |
| CE15785_S25 | Myrosinase | A09.1 | Red Giant | 143 | 0.54 |
| CE15785_S25 | Myrosinase | A09.1 | Red Giant | 144 | 2.19 |
| CE15785_S25 | Myrosinase | A09.1 | Red Giant | 145 | 3.73 |
| CE15785_S25 | Myrosinase | A09.1 | Red Giant | 146 | 6.54 |
| CE15785_S25 | Myrosinase | A09.1 | Red Giant | 147 | 65.53 |
| CE15785_S654 | Myrosinase | A01.1 | Red Giant | 148 | 100 |
| CE15785_S654 | Myrosinase | A02.1 | Red Giant | 149 | 99.05 |
| CE15785_S654 | Myrosinase | A02.1 | Red Giant | 150 | 100 |
| CE15785_S654 | Myrosinase | A03.1 | Red Giant | 151 | 100 |
| CE15785_S654 | Myrosinase | A03.1 | Red Giant | 152 | 100 |
| CE15785_S654 | Myrosinase | A09.1 | Red Giant | 153 | 99.77 |
| CE15785_S654 | Myrosinase | B04_cl1.4 | Red Giant | 154 | 100 |
| CE15785_S654 | Myrosinase | B07.1 | Red Giant | 155 | 100 |
| CE18322_S678 | Myrosinase | A01.1 | Red Giant | 156 | 76.23 |
| CE18322_S678 | Myrosinase | A02.1 | Red Giant | 157 | 99.27 |
| CE18322_S678 | Myrosinase | A02.1 | Red Giant | 158 | 36.63 |
| CE18322_S678 | Myrosinase | A02.1 | Red Giant | 159 | 62.67 |
| CE18322_S678 | Myrosinase | A02.2 | Red Giant | 160 | 99.87 |
| CE18322_S678 | Myrosinase | A03.1 | Red Giant | 161 | 52.53 |
| CE18322_S678 | Myrosinase | A03.1 | Red Giant | 162 | 42.46 |
| CE18322_S678 | Myrosinase | A09.1 | Red Giant | 163 | 100 |
| CE18322_S678 | Myrosinase | A09.1 | Red Giant | 164 | 98.16 |
| CE18322_S678 | Myrosinase | B04_cl1.2 | Red Giant | 165 | 100 |
| CE18322_S678 | Myrosinase | B04_cl1.3 | Red Giant | 166 | 99.2 |
| CE18322_S678 | Myrosinase | B04_cl1.4 | Red Giant | 167 | 58.11 |
| CE18322_S678 | Myrosinase | B04_cl1.4 | Red Giant | 168 | 39.97 |
| CE18322_S678 | Myrosinase | B04_cl2.1 | Red Giant | 169 | 55.6 |
| CE18322_S678 | Myrosinase | B04_cl2.1 | Red Giant | 170 | 39.83 |
| CE18322_S678 | Myrosinase | B04_cl2.1 | Red Giant | 171 | 57 |
| CE18322_S678 | Myrosinase | B04_cl2.1 | Red Giant | 172 | 42.41 |
| CE18322_S678 | Myrosinase | B07.1 | Red Giant | 173 | 51.28 |
| CE18322_S678 | Myrosinase | B07.1 | Red Giant | 174 | 48.05 |
| CE18322_S678 | Myrosinase | B07.1 | Red Giant | 175 | 99.96 |
| CE21573_S2 | Myrosinase | A02.1 | Southern | 176 | 42.71 |
| | | | Giant Curl | | |
| CE21573_S2 | Myrosinase | A02.2 | Southern | 177 | 48.33 |
| | | | Giant Curl | | |
| CE21573_S2 | Myrosinase | A02.2 | Southern | 178 | 47.58 |
| | | | Giant Curl | | |
| CE21573_S2 | Myrosinase | A09.1 | Southern | 179 | 44.73 |
| | | | Giant Curl | | |
| CE21573_S2 | Myrosinase | B04_cl1.1 | Southern | 180 | 38.12 |
| | | | Giant Curl | | |
| CE21573_S2 | Myrosinase | B04_cl2.1 | Southern | 181 | 21.44 |
| | | | Giant Curl | | |
| CE21573_S2 | Myrosinase | B07.1 | Southern | 182 | 12.2 |
| | | | Giant Curl | | |
| CE21573_S36 | Myrosinase | A02.2 | Southern | 183 | 34.94 |
| | | | Giant Curl | | |
| CE21573_S36 | Myrosinase | A02.2 | Southern | 184 | 42.66 |
| | | | Giant Curl | | |
| CE21573_S36 | Myrosinase | A09.1 | Southern | 185 | 4.96 |
| | | | Giant Curl | | |
| CE21573_S36 | Myrosinase | A09.1 | Southern | 186 | 28.46 |
| | | | Giant Curl | | |
| CE21573_S612 | Myrosinase | A02.1 | Southern | 187 | 50.13 |
| | | | Giant Curl | | |
| CE21573_S612 | Myrosinase | A02.2 | Southern | 188 | 46.39 |
| | | | Giant Curl | | |
| CE21573_S612 | Myrosinase | A02.2 | Southern | 189 | 46.39 |
| | | | Giant Curl | | |
| CE21573_S612 | Myrosinase | A09.1 | Southern | 190 | 47.29 |
| | | | Giant Curl | | |
| CE21573_S612 | Myrosinase | B04_cl1.1 | Southern | 191 | 34.81 |
| | | | Giant Curl | | |
| CE21573_S612 | Myrosinase | B04_cl2.1 | Southern | 192 | 21.21 |
| | | | Giant Curl | | |
| CE31357_S57 | Myrosinase | A02.1 | Southern | 193 | 4.41 |
| | | | Giant Curl | | |
| CE31357_S57 | Myrosinase | A02.2 | Southern | 194 | 95.72 |
| | | | Giant Curl | | |
| CE31357_S57 | Myrosinase | A02.2 | Southern | 195 | 93.26 |
| | | | Giant Curl | | |
| CE31357_S57 | Myrosinase | A03.1 | Southern | 196 | 47.63 |
| | | | Giant Curl | | |
| CE31357_S57 | Myrosinase | A03.1 | Southern | 197 | 0.55 |
| | | | Giant Curl | | |
| CE31357_S57 | Myrosinase | A03.1 | Southern | 198 | 49.14 |
| | | | Giant Curl | | |
| CE31357_S57 | Myrosinase | A03.1 | Southern | 199 | 45.56 |
| | | | Giant Curl | | |
| CE31357_S57 | Myrosinase | A09.1 | Southern | 200 | 0.77 |
| | | | Giant Curl | | |
| CE31357_S57 | Myrosinase | B04_cl1.3 | Southern | 201 | 22.94 |
| | | | Giant Curl | | |
| CE31357_S57 | Myrosinase | B04_cl1.4 | Southern | 202 | 50.35 |
| | | | Giant Curl | | |
| CE31357_S57 | Myrosinase | B04_cl1.4 | Southern | 203 | 45.42 |
| | | | Giant Curl | | |
| CE31357_S57 | Myrosinase | B04_cl2.1 | Southern | 204 | 39.78 |
| | | | Giant Curl | | |
| CE31357_S57 | Myrosinase | B04_cl2.1 | Southern | 205 | 100 |
| | | | Giant Curl | | |
| CE31357_S57 | Myrosinase | B07.1 | Southern | 206 | 37.32 |
| | | | Giant Curl | | |
| CE31357_S667 | Myrosinase | A02.2 | Southern | 207 | 99.44 |
| | | | Giant Curl | | |
| CE31357_S667 | Myrosinase | A02.2 | Southern | 208 | 97.99 |
| | | | Giant Curl | | |
| CE31357_S667 | Myrosinase | A03.1 | Southern | 209 | 51.99 |
| | | | Giant Curl | | |
| CE31357_S667 | Myrosinase | A03.1 | Southern | 210 | 51.48 |
| | | | Giant Curl | | |
| CE31357_S667 | Myrosinase | A03.1 | Southern | 211 | 46.41 |
| | | | Giant Curl | | |
| CE31357_S667 | Myrosinase | B04_cl1.3 | Southern | 212 | 25.32 |
| | | | Giant Curl | | |
| CE31357_S667 | Myrosinase | B04_cl1.4 | Southern | 213 | 48.57 |
| | | | Giant Curl | | |
| CE31357_S667 | Myrosinase | B04_cl1.4 | Southern | 214 | 45 |
| | | | Giant Curl | | |
| CE31357_S667 | Myrosinase | B04_cl2.1 | Southern | 215 | 46.28 |
| | | | Giant Curl | | |
| CE31357_S667 | Myrosinase | B04_cl2.1 | Southern | 216 | 99.86 |
| | | | Giant Curl | | |
| CE31357_S667 | Myrosinase | B07.1 | Southern | 217 | 19.96 |
| | | | Giant Curl | | |
| CE33147_S58 | Myrosinase | A01.1 | Red Giant | 218 | 98.02 |
| CE33147_S58 | Myrosinase | A02.1 | Red Giant | 219 | 97.42 |
| CE33147_S58 | Myrosinase | A02.1 | Red Giant | 220 | 99.51 |
| CE33147_S58 | Myrosinase | A03.1 | Red Giant | 221 | 92.64 |
| CE33147_S58 | Myrosinase | A03.1 | Red Giant | 222 | 96.88 |
| CE33147_S58 | Myrosinase | A09.1 | Red Giant | 223 | 80.7 |
| CE33147_S58 | Myrosinase | B04_cl1.3 | Red Giant | 224 | 99.71 |
| CE33147_S58 | Myrosinase | B04_cl1.4 | Red Giant | 225 | 99.79 |
| CE33147_S58 | Myrosinase | B04_cl2.1 | Red Giant | 226 | 92.2 |
| CE33147_S58 | Myrosinase | B07.1 | Red Giant | 227 | 97.36 |
| CE33147_S668 | Myrosinase | A01.1 | Red Giant | 228 | 99.75 |
| CE33147_S668 | Myrosinase | A02.1 | Red Giant | 229 | 99.45 |
| CE33147_S668 | Myrosinase | A02.1 | Red Giant | 230 | 99.72 |
| CE33147_S668 | Myrosinase | A03.1 | Red Giant | 231 | 99.36 |
| CE33147_S668 | Myrosinase | A03.1 | Red Giant | 232 | 99.46 |
| CE33147_S668 | Myrosinase | A09.1 | Red Giant | 233 | 78.46 |
| CE33147_S668 | Myrosinase | B04_cl1.3 | Red Giant | 234 | 99.12 |
| CE33147_S668 | Myrosinase | B04_cl1.4 | Red Giant | 235 | 99.57 |
| CE33147_S668 | Myrosinase | B07.1 | Red Giant | 236 | 99.05 |
| CE33150_S3 | Myrosinase | A02.2 | Red Giant | 237 | 99.13 |
| CE33150_S3 | Myrosinase | A02.2 | Red Giant | 238 | 98.94 |
| CE33150_S3 | Myrosinase | A03.1 | Red Giant | 239 | 50.25 |
| CE33150_S3 | Myrosinase | A09.1 | Red Giant | 240 | 55.11 |
| CE33150_S3 | Myrosinase | A09.1 | Red Giant | 241 | 54.09 |
| CE33150_S3 | Myrosinase | B04_cl1.4 | Red Giant | 242 | 99.42 |
| CE33150_S3 | Myrosinase | B04_cl2.1 | Red Giant | 243 | 45.07 |
| CE33150_S3 | Myrosinase | B04_cl2.1 | Red Giant | 244 | 98.65 |
| CE33150_S3 | Myrosinase | B07.1 | Red Giant | 245 | 50.7 |
| CE33150_S3 | Myrosinase | B07.1 | Red Giant | 246 | 50.81 |
| CE33150_S3 | Myrosinase | B07.1 | Red Giant | 247 | 47.25 |
| CE33150_S613 | Myrosinase | A02.2 | Red Giant | 248 | 99.82 |
| CE33150_S613 | Myrosinase | A02.2 | Red Giant | 249 | 99.65 |
| CE33150_S613 | Myrosinase | A03.1 | Red Giant | 250 | 55.68 |
| CE33150_S613 | Myrosinase | A09.1 | Red Giant | 251 | 53.35 |
| CE33150_S613 | Myrosinase | A09.1 | Red Giant | 252 | 53.53 |
| CE33150_S613 | Myrosinase | B04_cl1.4 | Red Giant | 253 | 98.94 |
| CE33150_S613 | Myrosinase | B04_cl2.1 | Red Giant | 254 | 49.68 |
| CE33150_S613 | Myrosinase | B04_cl2.1 | Red Giant | 255 | 100 |
| CE33150_S613 | Myrosinase | B07.1 | Red Giant | 256 | 50.96 |
| CE33150_S613 | Myrosinase | B07.1 | Red Giant | 257 | 51.23 |
| CE33150_S613 | Myrosinase | B07.1 | Red Giant | 258 | 48.42 |
| CE33152_S11 | Myrosinase | A01.1 | Red Giant | 259 | 49.68 |
| CE33152_S11 | Myrosinase | A02.1 | Red Giant | 260 | 97.61 |
| CE33152_S11 | Myrosinase | A02.1 | Red Giant | 261 | 4.84 |
| CE33152_S11 | Myrosinase | A02.1 | Red Giant | 262 | 48.37 |
| CE33152_S11 | Myrosinase | A02.2 | Red Giant | 263 | 50.16 |
| CE33152_S11 | Myrosinase | A03.1 | Red Giant | 264 | 58.56 |
| CE33152_S11 | Myrosinase | A03.1 | Red Giant | 265 | 35.61 |
| CE33152_S11 | Myrosinase | A09.1 | Red Giant | 266 | 94.48 |
| CE33152_S11 | Myrosinase | A09.1 | Red Giant | 267 | 95.33 |
| CE33152_S11 | Myrosinase | B04_cl1.2 | Red Giant | 268 | 97.8 |
| CE33152_S11 | Myrosinase | B04_cl1.3 | Red Giant | 269 | 97.61 |
| CE33152_S11 | Myrosinase | B04_cl1.4 | Red Giant | 270 | 60.82 |
| CE33152_S11 | Myrosinase | B04_cl1.4 | Red Giant | 271 | 36.24 |
| CE33152_S11 | Myrosinase | B04_cl2.1 | Red Giant | 272 | 26.38 |
| CE33152_S11 | Myrosinase | B04_cl2.1 | Red Giant | 273 | 19.92 |
| CE33152_S11 | Myrosinase | B04_cl2.1 | Red Giant | 274 | 55.09 |
| CE33152_S11 | Myrosinase | B04_cl2.1 | Red Giant | 275 | 44.16 |
| CE33152_S11 | Myrosinase | B07.1 | Red Giant | 276 | 49.24 |
| CE33152_S11 | Myrosinase | B07.1 | Red Giant | 277 | 48.84 |
| CE33152_S11 | Myrosinase | B07.1 | Red Giant | 278 | 98.23 |
| CE33152_S621 | Myrosinase | A01.1 | Red Giant | 279 | 45.03 |
| CE33152_S621 | Myrosinase | A02.1 | Red Giant | 280 | 98.54 |
| CE33152_S621 | Myrosinase | A02.1 | Red Giant | 281 | 6.25 |
| CE33152_S621 | Myrosinase | A02.1 | Red Giant | 282 | 44.95 |
| CE33152_S621 | Myrosinase | A02.2 | Red Giant | 283 | 49.8 |
| CE33152_S621 | Myrosinase | A03.1 | Red Giant | 284 | 57.46 |
| CE33152_S621 | Myrosinase | A03.1 | Red Giant | 285 | 38.9 |
| CE33152_S621 | Myrosinase | A09.1 | Red Giant | 286 | 96.71 |
| CE33152_S621 | Myrosinase | A09.1 | Red Giant | 287 | 99.42 |
| CE33152_S621 | Myrosinase | B04_cl1.2 | Red Giant | 288 | 99.47 |
| CE33152_S621 | Myrosinase | B04_cl1.3 | Red Giant | 289 | 97.82 |
| CE33152_S621 | Myrosinase | B04_cl1.4 | Red Giant | 290 | 58.03 |
| CE33152_S621 | Myrosinase | B04_cl1.4 | Red Giant | 291 | 40.04 |
| CE33152_S621 | Myrosinase | B04_cl2.1 | Red Giant | 292 | 53.68 |
| CE33152_S621 | Myrosinase | B04_cl2.1 | Red Giant | 293 | 22.57 |
| CE33152_S621 | Myrosinase | B04_cl2.1 | Red Giant | 294 | 53.46 |
| CE33152_S621 | Myrosinase | B04_cl2.1 | Red Giant | 295 | 46.21 |
| CE33152_S621 | Myrosinase | B07.1 | Red Giant | 296 | 49.7 |
| CE33152_S621 | Myrosinase | B07.1 | Red Giant | 297 | 49.43 |
| CE33152_S621 | Myrosinase | B07.1 | Red Giant | 298 | 99.76 |
| CE33155_S19 | Myrosinase | A02.2 | Red Giant | 299 | 96.99 |
| CE33155_S19 | Myrosinase | A02.2 | Red Giant | 300 | 98.78 |
| CE33155_S19 | Myrosinase | A03.1 | Red Giant | 301 | 49.4 |
| CE33155_S19 | Myrosinase | A09.1 | Red Giant | 302 | 52.86 |
| CE33155_S19 | Myrosinase | A09.1 | Red Giant | 303 | 51.88 |
| CE33155_S19 | Myrosinase | A09.1 | Red Giant | 304 | 0.66 |
| CE33155_S19 | Myrosinase | B04_cl1.4 | Red Giant | 305 | 99.33 |
| CE33155_S19 | Myrosinase | B04_cl2.1 | Red Giant | 306 | 45.21 |
| CE33155_S19 | Myrosinase | B04_cl2.1 | Red Giant | 307 | 99.22 |
| CE33155_S19 | Myrosinase | B07.1 | Red Giant | 308 | 49.84 |
| CE33155_S19 | Myrosinase | B07.1 | Red Giant | 309 | 45.6 |
| CE33155_S629 | Myrosinase | A02.2 | Red Giant | 310 | 99.75 |
| CE33155_S629 | Myrosinase | A02.2 | Red Giant | 311 | 99.76 |
| CE33155_S629 | Myrosinase | A03.1 | Red Giant | 312 | 56.53 |
| CE33155_S629 | Myrosinase | A09.1 | Red Giant | 313 | 52.48 |
| CE33155_S629 | Myrosinase | A09.1 | Red Giant | 314 | 52.36 |
| CE33155_S629 | Myrosinase | B04_cl1.4 | Red Giant | 315 | 100 |
| CE33155_S629 | Myrosinase | B04_cl2.1 | Red Giant | 316 | 49.22 |
| CE33155_S629 | Myrosinase | B04_cl2.1 | Red Giant | 317 | 99.22 |
| CE33155_S629 | Myrosinase | B07.1 | Red Giant | 318 | 52.39 |
| CE33155_S629 | Myrosinase | B07.1 | Red Giant | 319 | 45.94 |
| CE41658_S113 | Myrosinase | A02.1 | Southern | 320 | 37.17 |
| | | | Giant Curl | | |
| CE41658_S113 | Myrosinase | A02.1 | Southern | 321 | 5.95 |
| | | | Giant Curl | | |
| CE41658_S113 | Myrosinase | A02.2 | Southern | 322 | 39.8 |
| | | | Giant Curl | | |
| CE41658_S113 | Myrosinase | A02.2 | Southern | 323 | 48.19 |
| | | | Giant Curl | | |
| CE41658_S113 | Myrosinase | A09.1 | Southern | 324 | 10.42 |
| | | | Giant Curl | | |
| CE41658_S113 | Myrosinase | A09.1 | Southern | 325 | 77.17 |
| | | | Giant Curl | | |
| CE41658_S113 | Myrosinase | A09.1 | Southern | 326 | 2.97 |
| | | | Giant Curl | | |
| CE41658_S3 | Myrosinase | A02.1 | Southern | 327 | 0.74 |
| | | | Giant Curl | | |
| CE41658_S3 | Myrosinase | A02.1 | Southern | 328 | 0.54 |
| | | | Giant Curl | | |
| CE41658_S3 | Myrosinase | A02.1 | Southern | 329 | 0.61 |
| | | | Giant Curl | | |
| CE41658_S3 | Myrosinase | A02.1 | Southern | 330 | 0.91 |
| | | | Giant Curl | | |
| CE41658_S3 | Myrosinase | A02.1 | Southern | 331 | 48.9 |
| | | | Giant Curl | | |
| CE41658_S3 | Myrosinase | A02.1 | Southern | 332 | 0.54 |
| | | | Giant Curl | | |
| CE41658_S3 | Myrosinase | A02.1 | Southern | 333 | 0.94 |
| | | | Giant Curl | | |
| CE41658_S3 | Myrosinase | A02.2 | Southern | 334 | 44.73 |
| | | | Giant Curl | | |
| CE41658_S3 | Myrosinase | A02.2 | Southern | 335 | 0.51 |
| | | | Giant Curl | | |
| CE41658_S3 | Myrosinase | A02.2 | Southern | 336 | 45.41 |
| | | | Giant Curl | | |
| CE41658_S3 | Myrosinase | A03.1 | Southern | 337 | 0.56 |
| | | | Giant Curl | | |
| CE41658_S3 | Myrosinase | A03.1 | Southern | 338 | 0.92 |
| | | | Giant Curl | | |
| CE41658_S3 | Myrosinase | A03.1 | Southern | 339 | 0.97 |
| | | | Giant Curl | | |
| CE41658_S3 | Myrosinase | A03.1 | Southern | 340 | 1.09 |
| | | | Giant Curl | | |
| CE41658_S3 | Myrosinase | A03.1 | Southern | 341 | 1.51 |
| | | | Giant Curl | | |
| CE41658_S3 | Myrosinase | A09.1 | Southern | 342 | 96.41 |
| | | | Giant Curl | | |
| CE41658_S3 | Myrosinase | A09.1 | Southern | 343 | 1.44 |
| | | | Giant Curl | | |
| CE41658_S3 | Myrosinase | B04_cl1.1 | Southern | 344 | 0.58 |
| | | | Giant Curl | | |
| CE41658_S3 | Myrosinase | B04_cl1.1 | Southern | 345 | 0.82 |
| | | | Giant Curl | | |
| CE41658_S3 | Myrosinase | B04_cl1.1 | Southern | 346 | 0.58 |
| | | | Giant Curl | | |
| CE41658_S3 | Myrosinase | B04_cl1.1 | Southern | 347 | 0.55 |
| | | | Giant Curl | | |
| CE41658_S3 | Myrosinase | B04_cl1.1 | Southern | 348 | 0.82 |
| | | | Giant Curl | | |
| CE41658_S3 | Myrosinase | B04_cl1.1 | Southern | 349 | 0.54 |
| | | | Giant Curl | | |
| CE41658_S3 | Myrosinase | B04_cl1.3 | Southern | 350 | 0.52 |
| | | | Giant Curl | | |
| CE41658_S3 | Myrosinase | B04_cl1.3 | Southern | 351 | 1.05 |
| | | | Giant Curl | | |
| CE41658_S3 | Myrosinase | B04_cl1.3 | Southern | 352 | 0.63 |
| | | | Giant Curl | | |
| CE41658_S3 | Myrosinase | B04_cl1.3 | Southern | 353 | 96.42 |
| | | | Giant Curl | | |
| CE41658_S3 | Myrosinase | B04_cl1.4 | Southern | 354 | 0.58 |
| | | | Giant Curl | | |
| CE41658_S3 | Myrosinase | B04_cl1.4 | Southern | 355 | 0.53 |
| | | | Giant Curl | | |
| CE41658_S3 | Myrosinase | B04_cl1.4 | Southern | 356 | 0.53 |
| | | | Giant Curl | | |
| CE41658_S3 | Myrosinase | B04_cl2.1 | Southern | 357 | 1.39 |
| | | | Giant Curl | | |
| CE41658_S3 | Myrosinase | B04_cl2.1 | Southern | 358 | 0.62 |
| | | | Giant Curl | | |
| CE41658_S3 | Myrosinase | B04_cl2.1 | Southern | 359 | 0.61 |
| | | | Giant Curl | | |
| CE41824_S121 | Myrosinase | A02.1 | Red Giant | 360 | 1.02 |
| CE41824_S121 | Myrosinase | A02.1 | Red Giant | 361 | 0.96 |
| CE41824_S121 | Myrosinase | A02.1 | Red Giant | 362 | 76.32 |
| CE41824_S121 | Myrosinase | A02.1 | Red Giant | 363 | 4.4 |
| CE41824_S121 | Myrosinase | A02.1 | Red Giant | 364 | 1.6 |
| CE41824_S121 | Myrosinase | A02.1 | Red Giant | 365 | 0.8 |
| CE41824_S121 | Myrosinase | A02.1 | Red Giant | 366 | 1.2 |
| CE41824_S121 | Myrosinase | A02.1 | Red Giant | 367 | 0.75 |
| CE41824_S121 | Myrosinase | A02.1 | Red Giant | 368 | 7.72 |
| CE41824_S121 | Myrosinase | A02.1 | Red Giant | 369 | 12.25 |
| CE41824_S121 | Myrosinase | A02.1 | Red Giant | 370 | 1.26 |
| CE41824_S121 | Myrosinase | A02.1 | Red Giant | 371 | 2.27 |
| CE41824_S121 | Myrosinase | A02.1 | Red Giant | 372 | 49.83 |
| CE41824_S121 | Myrosinase | A02.1 | Red Giant | 373 | 1.17 |
| CE41824_S121 | Myrosinase | A02.1 | Red Giant | 374 | 8.22 |
| CE41824_S121 | Myrosinase | A02.1 | Red Giant | 375 | 7.05 |
| CE41824_S121 | Myrosinase | A02.2 | Red Giant | 376 | 2.24 |
| CE41824_S121 | Myrosinase | A02.2 | Red Giant | 377 | 3.98 |
| CE41824_S121 | Myrosinase | A02.2 | Red Giant | 378 | 2.53 |
| CE41824_S121 | Myrosinase | A02.2 | Red Giant | 379 | 71.82 |
| CE41824_S121 | Myrosinase | A02.2 | Red Giant | 380 | 0.97 |
| CE41824_S121 | Myrosinase | A02.2 | Red Giant | 381 | 1.26 |
| CE41824_S121 | Myrosinase | A03.1 | Red Giant | 382 | 1.86 |
| CE41824_S121 | Myrosinase | A03.1 | Red Giant | 383 | 1.3 |
| CE41824_S121 | Myrosinase | A03.1 | Red Giant | 384 | 53.62 |
| CE41824_S121 | Myrosinase | A03.1 | Red Giant | 385 | 1.02 |
| CE41824_S121 | Myrosinase | A03.1 | Red Giant | 386 | 1.3 |
| CE41824_S121 | Myrosinase | A03.1 | Red Giant | 387 | 17.66 |
| CE41824_S121 | Myrosinase | A09.1 | Red Giant | 388 | 14.12 |
| CE41824_S121 | Myrosinase | A09.1 | Red Giant | 389 | 74.71 |
| CE41824_S121 | Myrosinase | A09.1 | Red Giant | 390 | 85.38 |
| CE41824_S121 | Myrosinase | A09.1 | Red Giant | 391 | 1.01 |
| CE41824_S121 | Myrosinase | B04_cl1.2 | Red Giant | 392 | 88.39 |
| CE41824_S121 | Myrosinase | B04_cl1.2 | Red Giant | 393 | 3.69 |
| CE41824_S121 | Myrosinase | B04_cl1.3 | Red Giant | 394 | 4.48 |
| CE41824_S121 | Myrosinase | B04_cl1.3 | Red Giant | 395 | 83.71 |
| CE41824_S121 | Myrosinase | B04_cl1.4 | Red Giant | 396 | 14.64 |
| CE41824_S121 | Myrosinase | B04_cl1.4 | Red Giant | 397 | 69.73 |
| CE41824_S121 | Myrosinase | B04_cl1.4 | Red Giant | 398 | 2.73 |
| CE41824_S121 | Myrosinase | B04_cl2.1 | Red Giant | 399 | 1.06 |
| CE41824_S121 | Myrosinase | B04_cl2.1 | Red Giant | 400 | 4.72 |
| CE41824_S121 | Myrosinase | B04_cl2.1 | Red Giant | 401 | 79.74 |
| CE41824_S121 | Myrosinase | B04_cl2.1 | Red Giant | 402 | 2.05 |
| CE41824_S121 | Myrosinase | B04_cl2.1 | Red Giant | 403 | 14.5 |
| CE41824_S121 | Myrosinase | B04_cl2.1 | Red Giant | 404 | 14.38 |
| CE41824_S121 | Myrosinase | B04_cl2.1 | Red Giant | 405 | 58.45 |
| CE41824_S121 | Myrosinase | B07.1 | Red Giant | 406 | 0.51 |
| CE41824_S121 | Myrosinase | B07.1 | Red Giant | 407 | 96.37 |
| CE41824_S121 | Myrosinase | B07.1 | Red Giant | 408 | 85.75 |
| CE41824_S121 | Myrosinase | B07.1 | Red Giant | 409 | 2.2 |
| CE41824_S121 | Myrosinase | B07.1 | Red Giant | 410 | 2.81 |
| CE41824_S4 | Myrosinase | A02.1 | Red Giant | 411 | 92.68 |
| CE41824_S4 | Myrosinase | A02.1 | Red Giant | 412 | 19.84 |
| CE41824_S4 | Myrosinase | A02.1 | Red Giant | 413 | 75.3 |
| CE41824_S4 | Myrosinase | A02.1 | Red Giant | 414 | 0.57 |
| CE41824_S4 | Myrosinase | A02.1 | Red Giant | 415 | 0.96 |
| CE41824_S4 | Myrosinase | A02.2 | Red Giant | 416 | 95.24 |
| CE41824_S4 | Myrosinase | A03.1 | Red Giant | 417 | 0.5 |
| CE41824_S4 | Myrosinase | A03.1 | Red Giant | 418 | 0.58 |
| CE41824_S4 | Myrosinase | A03.1 | Red Giant | 419 | 53.45 |
| CE41824_S4 | Myrosinase | A03.1 | Red Giant | 420 | 38.56 |
| CE41824_S4 | Myrosinase | A09.1 | Red Giant | 421 | 0.95 |
| CE41824_S4 | Myrosinase | A09.1 | Red Giant | 422 | 0.57 |
| CE41824_S4 | Myrosinase | A09.1 | Red Giant | 423 | 94.34 |
| CE41824_S4 | Myrosinase | A09.1 | Red Giant | 424 | 45.26 |
| CE41824_S4 | Myrosinase | A09.1 | Red Giant | 425 | 0.56 |
| CE41824_S4 | Myrosinase | A09.1 | Red Giant | 426 | 1.29 |
| CE41824_S4 | Myrosinase | A09.1 | Red Giant | 427 | 14.41 |
| CE41824_S4 | Myrosinase | A09.1 | Red Giant | 428 | 1.72 |
| CE41824_S4 | Myrosinase | A09.1 | Red Giant | 429 | 22.69 |
| CE41824_S4 | Myrosinase | A09.1 | Red Giant | 430 | 0.6 |
| CE41824_S4 | Myrosinase | B04_cl1.2 | Red Giant | 431 | 99.1 |
| CE41824_S4 | Myrosinase | B04_cl1.3 | Red Giant | 432 | 95.33 |
| CE41824_S4 | Myrosinase | B04_cl1.4 | Red Giant | 433 | 4 |
| CE41824_S4 | Myrosinase | B04_cl1.4 | Red Giant | 434 | 95.09 |
| CE41824_S4 | Myrosinase | B04_cl2.1 | Red Giant | 435 | 0.51 |
| CE41824_S4 | Myrosinase | B04_cl2.1 | Red Giant | 436 | 94.84 |
| CE41824_S4 | Myrosinase | B04_cl2.1 | Red Giant | 437 | 96.91 |
| CE41824_S4 | Myrosinase | B04_cl2.1 | Red Giant | 438 | 0.6 |
| CE41824_S4 | Myrosinase | B07.1 | Red Giant | 439 | 97.73 |
| CE41824_S4 | Myrosinase | B07.1 | Red Giant | 440 | 97.66 |
| CE41858_S129 | Myrosinase | A02.1 | Red Giant | 441 | 0.61 |
| CE41858_S129 | Myrosinase | A02.1 | Red Giant | 442 | 1.05 |
| CE41858_S129 | Myrosinase | A02.1 | Red Giant | 443 | 77.27 |
| CE41858_S129 | Myrosinase | A02.1 | Red Giant | 444 | 2.98 |
| CE41858_S129 | Myrosinase | A02.1 | Red Giant | 445 | 5.83 |
| CE41858_S129 | Myrosinase | A02.1 | Red Giant | 446 | 12.82 |
| CE41858_S129 | Myrosinase | A02.1 | Red Giant | 447 | 2.51 |
| CE41858_S129 | Myrosinase | A02.1 | Red Giant | 448 | 3 |
| CE41858_S129 | Myrosinase | A02.1 | Red Giant | 449 | 44.99 |
| CE41858_S129 | Myrosinase | A02.1 | Red Giant | 450 | 8.73 |
| CE41858_S129 | Myrosinase | A02.1 | Red Giant | 451 | 0.85 |
| CE41858_S129 | Myrosinase | A02.1 | Red Giant | 452 | 9.12 |
| CE41858_S129 | Myrosinase | A02.2 | Red Giant | 453 | 1.59 |
| CE41858_S129 | Myrosinase | A02.2 | Red Giant | 454 | 3.37 |
| CE41858_S129 | Myrosinase | A02.2 | Red Giant | 455 | 74.5 |
| CE41858_S129 | Myrosinase | A02.2 | Red Giant | 456 | 0.54 |
| CE41858_S129 | Myrosinase | A03.1 | Red Giant | 457 | 2.46 |
| CE41858_S129 | Myrosinase | A03.1 | Red Giant | 458 | 0.65 |
| CE41858_S129 | Myrosinase | A03.1 | Red Giant | 459 | 2.31 |
| CE41858_S129 | Myrosinase | A03.1 | Red Giant | 460 | 1.86 |
| CE41858_S129 | Myrosinase | A03.1 | Red Giant | 461 | 0.65 |
| CE41858_S129 | Myrosinase | A03.1 | Red Giant | 462 | 3.9 |
| CE41858_S129 | Myrosinase | A03.1 | Red Giant | 463 | 1.11 |
| CE41858_S129 | Myrosinase | A03.1 | Red Giant | 464 | 0.72 |
| CE41858_S129 | Myrosinase | A03.1 | Red Giant | 465 | 54.5 |
| CE41858_S129 | Myrosinase | A09.1 | Red Giant | 466 | 0.61 |
| CE41858_S129 | Myrosinase | A09.1 | Red Giant | 467 | 0.7 |
| CE41858_S129 | Myrosinase | A09.1 | Red Giant | 468 | 0.8 |
| CE41858_S129 | Myrosinase | A09.1 | Red Giant | 469 | 13.93 |
| CE41858_S129 | Myrosinase | A09.1 | Red Giant | 470 | 0.89 |
| CE41858_S129 | Myrosinase | A09.1 | Red Giant | 471 | 0.55 |
| CE41858_S129 | Myrosinase | A09.1 | Red Giant | 472 | 70.77 |
| CE41858_S129 | Myrosinase | A09.1 | Red Giant | 473 | 1.22 |
| CE41858_S129 | Myrosinase | A09.1 | Red Giant | 474 | 82.16 |
| CE41858_S129 | Myrosinase | A09.1 | Red Giant | 475 | 1.01 |
| CE41858_S129 | Myrosinase | B04_cl1.2 | Red Giant | 476 | 0.66 |
| CE41858_S129 | Myrosinase | B04_cl1.2 | Red Giant | 477 | 88.43 |
| CE41858_S129 | Myrosinase | B04_cl1.2 | Red Giant | 478 | 2.74 |
| CE41858_S129 | Myrosinase | B04_cl1.3 | Red Giant | 479 | 0.52 |
| CE41858_S129 | Myrosinase | B04_cl1.3 | Red Giant | 480 | 4.64 |
| CE41858_S129 | Myrosinase | B04_cl1.3 | Red Giant | 481 | 0.77 |
| CE41858_S129 | Myrosinase | B04_cl1.3 | Red Giant | 482 | 0.9 |
| CE41858_S129 | Myrosinase | B04_cl1.3 | Red Giant | 483 | 76.02 |
| CE41858_S129 | Myrosinase | B04_cl1.4 | Red Giant | 484 | 2.21 |
| CE41858_S129 | Myrosinase | B04_cl1.4 | Red Giant | 485 | 1.14 |
| CE41858_S129 | Myrosinase | B04_cl1.4 | Red Giant | 486 | 1.53 |
| CE41858_S129 | Myrosinase | B04_cl1.4 | Red Giant | 487 | 1.02 |
| CE41858_S129 | Myrosinase | B04_cl1.4 | Red Giant | 488 | 1.98 |
| CE41858_S129 | Myrosinase | B04_cl1.4 | Red Giant | 489 | 1.35 |
| CE41858_S129 | Myrosinase | B04_cl1.4 | Red Giant | 490 | 0.81 |
| CE41858_S129 | Myrosinase | B04_cl1.4 | Red Giant | 491 | 0.61 |
| CE41858_S129 | Myrosinase | B04_cl1.4 | Red Giant | 492 | 1.98 |
| CE41858_S129 | Myrosinase | B04_cl1.4 | Red Giant | 493 | 1.53 |
| CE41858_S129 | Myrosinase | B04_cl1.4 | Red Giant | 494 | 0.51 |
| CE41858_S129 | Myrosinase | B04_cl1.4 | Red Giant | 495 | 34.22 |
| CE41858_S129 | Myrosinase | B04_cl1.4 | Red Giant | 496 | 0.61 |
| CE41858_S129 | Myrosinase | B04_cl1.4 | Red Giant | 497 | 24.12 |
| CE41858_S129 | Myrosinase | B04_cl2.1 | Red Giant | 498 | 0.6 |
| CE41858_S129 | Myrosinase | B04_cl2.1 | Red Giant | 499 | 1.27 |
| CE41858_S129 | Myrosinase | B04_cl2.1 | Red Giant | 500 | 0.87 |
| CE41858_S129 | Myrosinase | B04_cl2.1 | Red Giant | 501 | 2.8 |
| CE41858_S129 | Myrosinase | B04_cl2.1 | Red Giant | 502 | 0.5 |
| CE41858_S129 | Myrosinase | B04_cl2.1 | Red Giant | 503 | 74.73 |
| CE41858_S129 | Myrosinase | B04_cl2.1 | Red Giant | 504 | 2.22 |
| CE41858_S129 | Myrosinase | B04_cl2.1 | Red Giant | 505 | 12.99 |
| CE41858_S129 | Myrosinase | B04_cl2.1 | Red Giant | 506 | 0.71 |
| CE41858_S129 | Myrosinase | B04_cl2.1 | Red Giant | 507 | 0.98 |
| CE41858_S129 | Myrosinase | B04_cl2.1 | Red Giant | 508 | 0.84 |
| CE41858_S129 | Myrosinase | B04_cl2.1 | Red Giant | 509 | 0.67 |
| CE41858_S129 | Myrosinase | B04_cl2.1 | Red Giant | 510 | 13.71 |
| CE41858_S129 | Myrosinase | B04_cl2.1 | Red Giant | 511 | 57.66 |
| CE41858_S129 | Myrosinase | B07.1 | Red Giant | 512 | 46.68 |
| CE41858_S129 | Myrosinase | B07.1 | Red Giant | 513 | 46.87 |
| CE41858_S129 | Myrosinase | B07.1 | Red Giant | 514 | 87.4 |
| CE41858_S129 | Myrosinase | B07.1 | Red Giant | 515 | 1.53 |
| CE41858_S129 | Myrosinase | B07.1 | Red Giant | 516 | 3.37 |
| CE41858_S5 | Myrosinase | A02.1 | Red Giant | 517 | 91.04 |
| CE41858_S5 | Myrosinase | A02.1 | Red Giant | 518 | 0.61 |
| CE41858_S5 | Myrosinase | A02.1 | Red Giant | 519 | 17.06 |
| CE41858_S5 | Myrosinase | A02.1 | Red Giant | 520 | 76.89 |
| CE41858_S5 | Myrosinase | A02.1 | Red Giant | 521 | 0.6 |
| CE41858_S5 | Myrosinase | A02.1 | Red Giant | 522 | 0.7 |
| CE41858_S5 | Myrosinase | A02.2 | Red Giant | 523 | 94.05 |
| CE41858_S5 | Myrosinase | A02.2 | Red Giant | 524 | 0.64 |
| CE41858_S5 | Myrosinase | A03.1 | Red Giant | 525 | 0.52 |
| CE41858_S5 | Myrosinase | A03.1 | Red Giant | 526 | 0.84 |
| CE41858_S5 | Myrosinase | A03.1 | Red Giant | 527 | 86.21 |
| CE41858_S5 | Myrosinase | A09.1 | Red Giant | 528 | 0.68 |
| CE41858_S5 | Myrosinase | A09.1 | Red Giant | 529 | 94.73 |
| CE41858_S5 | Myrosinase | A09.1 | Red Giant | 530 | 46.61 |
| CE41858_S5 | Myrosinase | A09.1 | Red Giant | 531 | 0.62 |
| CE41858_S5 | Myrosinase | A09.1 | Red Giant | 532 | 1.42 |
| CE41858_S5 | Myrosinase | A09.1 | Red Giant | 533 | 13.78 |
| CE41858_S5 | Myrosinase | A09.1 | Red Giant | 534 | 2.38 |
| CE41858_S5 | Myrosinase | A09.1 | Red Giant | 535 | 19.49 |
| CE41858_S5 | Myrosinase | A09.1 | Red Giant | 536 | 0.65 |
| CE41858_S5 | Myrosinase | A09.1 | Red Giant | 537 | 0.7 |
| CE41858_S5 | Myrosinase | B04_cl1.2 | Red Giant | 538 | 97.23 |
| CE41858_S5 | Myrosinase | B04_cl1.3 | Red Giant | 539 | 92.24 |
| CE41858_S5 | Myrosinase | B04_cl1.4 | Red Giant | 540 | 2.01 |
| CE41858_S5 | Myrosinase | B04_cl1.4 | Red Giant | 541 | 1.23 |
| CE41858_S5 | Myrosinase | B04_cl1.4 | Red Giant | 542 | 50.91 |
| CE41858_S5 | Myrosinase | B04_cl1.4 | Red Giant | 543 | 41.03 |
| CE41858_S5 | Myrosinase | B04_cl2.1 | Red Giant | 544 | 0.5 |
| CE41858_S5 | Myrosinase | B04_cl2.1 | Red Giant | 545 | 91.77 |
| CE41858_S5 | Myrosinase | B04_cl2.1 | Red Giant | 546 | 96.1 |
| CE41858_S5 | Myrosinase | B04_cl2.1 | Red Giant | 547 | 0.57 |
| CE41858_S5 | Myrosinase | B07.1 | Red Giant | 548 | 47.4 |
| CE41858_S5 | Myrosinase | B07.1 | Red Giant | 549 | 49.75 |
| CE41858_S5 | Myrosinase | B07.1 | Red Giant | 550 | 96.51 |
| CE41984_S144 | Myrosinase | A01.1 | Red Giant | 551 | 93.15 |
| CE41984_S144 | Myrosinase | A02.1 | Red Giant | 552 | 0.54 |
| CE41984_S144 | Myrosinase | A02.1 | Red Giant | 553 | 89.53 |
| CE41984_S144 | Myrosinase | A02.1 | Red Giant | 554 | 72.4 |
| CE41984_S144 | Myrosinase | A02.1 | Red Giant | 555 | 0.5 |
| CE41984_S144 | Myrosinase | A02.1 | Red Giant | 556 | 6.58 |
| CE41984_S144 | Myrosinase | A02.1 | Red Giant | 557 | 8.67 |
| CE41984_S144 | Myrosinase | A02.1 | Red Giant | 558 | 1.49 |
| CE41984_S144 | Myrosinase | A03.1 | Red Giant | 559 | 3.32 |
| CE41984_S144 | Myrosinase | A03.1 | Red Giant | 560 | 78.96 |
| CE41984_S144 | Myrosinase | A03.1 | Red Giant | 561 | 2.84 |
| CE41984_S144 | Myrosinase | A03.1 | Red Giant | 562 | 1.82 |
| CE41984_S144 | Myrosinase | A03.1 | Red Giant | 563 | 0.6 |
| CE41984_S144 | Myrosinase | A03.1 | Red Giant | 564 | 80.86 |
| CE41984_S144 | Myrosinase | A03.1 | Red Giant | 565 | 0.51 |
| CE41984_S144 | Myrosinase | B04_cl1.3 | Red Giant | 566 | 100 |
| CE41984_S144 | Myrosinase | B04_cl2.1 | Red Giant | 567 | 3.63 |
| CE41984_S144 | Myrosinase | B04_cl2.1 | Red Giant | 568 | 2.31 |
| CE41984_S144 | Myrosinase | B04_cl2.1 | Red Giant | 569 | 79.21 |
| CE41984_S144 | Myrosinase | B07.1 | Red Giant | 570 | 97.38 |
| CE41984_S7 | Myrosinase | A01.1 | Red Giant | 571 | 97.05 |
| CE41984_S7 | Myrosinase | A02.1 | Red Giant | 572 | 94.7 |
| CE41984_S7 | Myrosinase | A02.1 | Red Giant | 573 | 96.88 |
| CE41984_S7 | Myrosinase | A03.1 | Red Giant | 574 | 94.74 |
| CE41984_S7 | Myrosinase | A03.1 | Red Giant | 575 | 1.2 |
| CE41984_S7 | Myrosinase | A03.1 | Red Giant | 576 | 0.95 |
| CE41984_S7 | Myrosinase | A03.1 | Red Giant | 577 | 91.73 |
| CE41984_S7 | Myrosinase | B04_cl1.3 | Red Giant | 578 | 100 |
| CE41984_S7 | Myrosinase | B04_cl2.1 | Red Giant | 579 | 98.63 |
| CE41984_S7 | Myrosinase | B07.1 | Red Giant | 580 | 98.76 |
| CE41986_N2_S150 | Myrosinase | A09.1 | Red Giant | 581 | 94.98 |
| CE41986_N2_S150 | Myrosinase | B04_cl2.1 | Red Giant | 582 | 80.33 |
| CE41986_S152 | Myrosinase | A02.1 | Red Giant | 583 | 88.44 |
| CE41986_S152 | Myrosinase | A02.1 | Red Giant | 584 | 8.16 |
| CE41986_S152 | Myrosinase | A09.1 | Red Giant | 585 | 7.12 |
| CE41986_S152 | Myrosinase | A09.1 | Red Giant | 586 | 91.53 |
| CE41986_S152 | Myrosinase | B04_cl2.1 | Red Giant | 587 | 71.43 |
| CE41986_S152 | Myrosinase | B04_cl2.1 | Red Giant | 588 | 7.94 |
| CE41986_S8 | Myrosinase | A01.1 | Red Giant | 589 | 95.18 |
| CE41986_S8 | Myrosinase | A01.1 | Red Giant | 590 | 2.53 |
| CE41986_S8 | Myrosinase | A02.1 | Red Giant | 591 | 95.02 |
| CE41986_S8 | Myrosinase | A02.1 | Red Giant | 592 | 99.23 |
| CE41986_S8 | Myrosinase | A03.1 | Red Giant | 593 | 99.37 |
| CE41986_S8 | Myrosinase | A03.1 | Red Giant | 594 | 89.34 |
| CE41986_S8 | Myrosinase | A09.1 | Red Giant | 595 | 98.7 |
| CE41986_S8 | Myrosinase | B04_cl1.4 | Red Giant | 596 | 5.29 |
| CE41986_S8 | Myrosinase | B04_cl1.4 | Red Giant | 597 | 94.71 |
| CE41986_S8 | Myrosinase | B07.1 | Red Giant | 598 | 1.3 |
| CE41986_S8 | Myrosinase | B07.1 | Red Giant | 599 | 95.96 |
| CE36897_S305 | AOP2 | BjuB018584 | Green Wave | 600 | 0.89 |
| CE36897_S305 | AOP2 | BjuB018584 | Green Wave | 601 | 44.11 |
| CE36897_S305 | AOP2 | BjuB018584 | Green Wave | 602 | 0.89 |
| CE36897_S305 | AOP2 | BjuB018584 | Green Wave | 603 | 0.59 |
| CE36897_S305 | AOP2 | BjuB018584 | Green Wave | 604 | 98.95 |
| CE36897_S305 | AOP2 | BjuB000368 | Green Wave | 605 | 56.72 |
| CE36897_S305 | AOP2 | BjuB000368 | Green Wave | 606 | 41.43 |
| CE36897_S305 | AOP2 | BjuA007827 | Green Wave | 607 | 99.63 |
| CE34664_S7 | AOP2 | BjuA007827 | Green Wave | 608 | 49.63 |
| CE34664_S7 | AOP2 | BjuA007827 | Green Wave | 609 | 50.08 |
| CE_34664_S617 | AOP2 | BjuB018584 | Green Wave | 610 | 99.52 |
| CE_34664_S617 | AOP2 | BjuB018584 | Green Wave | 611 | 0.68 |
| CE_35423_S633 | AOP2 | BjuB018584 | Green Wave | 612 | 4.7 |
| CE36443_S671 | AOP2 | BjuB000368 | Green Wave | 613 | 40.74 |
| CE36443_S671 | AOP2 | BjuA031496 | Green Wave | 614 | 75.25 |
| CE36897_S664 | AOP2 | BjuB018584 | Green Wave | 615 | 23.88 |
| CE36897_S664 | AOP2 | BjuB018584 | Green Wave | 616 | 22.97 |
| EPS3531 | CYP79F1 | BjuB021730 | Green Wave | 788 | 3 |
| EPS3531 | CYP79F1 | BjuB021730 | Green Wave | 789 | 2 |
| EPS3531 | CYP79F1 | BjuB021730 | Green Wave | 790 | 2 |
| EPS3531 | CYP79F1 | BjuB021730 | Green Wave | 791 | 2 |
| EPS3531 | CYP79F1 | BjuB021730 | Green Wave | 792 | 1 |
| EPS3531 | CYP79F1 | BjuB021730 | Green Wave | 793 | 1 |
| EPS3532 | CYP79F1 | BjuB021730 | Green Wave | 794 | 22 |
| EPS3532 | CYP79F1 | BjuB021730 | Green Wave | 794 | 37 |
| EPS3532 | CYP79F1 | BjuB021730 | Green Wave | 796 | 20 |
| EPS3532 | CYP79F1 | BjuB021730 | Green Wave | 797 | 5 |
| EPS3532 | CYP79F1 | BjuB021730 | Green Wave | 798 | 5 |
| EPS3532 | CYP79F1 | BjuB021730 | Green Wave | 799 | 38 |
| CE34664 | AOP2 | BjuA010951_BjuA010952 | Green Wave | 800 | 0.99 |
| | | A03_aop2 | | | |
| CE35423 | AOP2 | BjuA010951_BjuA010952 | Green Wave | 801 | 0.48 |
| | | A03_aop2 | | | |
| CE35423 | AOP2 | BjuA010951_BjuA010952 | Green Wave | 802 | 0.43 |
| | | A03_aop2 | | | |
| CE35423 | AOP2 | BjuA010951_BjuA010952 | Green Wave | 803 | 0.06 |
| | | A03_aop2 | | | |
| CE36896 | AOP2 | BjuA010951_BjuA010952 | Green Wave | 804 | 0.02 |
| | | A03_aop2 | | | |
| CE36896 | AOP2 | BjuA010951_BjuA010952 | Green Wave | 805 | 0.01 |
| | | A03_aop2 | | | |
| CE36897 | AOP2 | BjuA010951_BjuA010952 | Green Wave | 806 | 0.09 |
| | | A03_aop2 | | | |
| CE36897 | AOP2 | BjuA010951_BjuA010952 | Green Wave | 807 | 0.88 |
| | | A03_aop2 | | | |
| CE36897 | AOP2 | BjuA010951_BjuA010952 | Green Wave | 808 | 0.07 |
| | | A03_aop2 | | | |
| CE36897 | AOP2 | BjuA010951_BjuA010952 | Green Wave | 809 | 0.03 |
| | | A03_aop2 | | | |
| CE36897 | AOP2 | BjuA010951_BjuA010952 | Green Wave | 810 | 0.01 |
| | | A03_aop2 | | | |
| CE36897 | AOP2 | BjuA010951_BjuA010952 | Green Wave | 811 | 0.29 |
| | | A03_aop2 | | | |
| CE38248 | AOP2 | BjuA010951_BjuA010952 | Green Wave | 812 | 0.39 |
| | | A03_aop2 | | | |
| CE38248 | AOP2 | BjuA010951_BjuA010952 | Green Wave | 813 | 0.47 |
| | | A03_aop2 | | | |
| CE38248 | AOP2 | BjuA010951_BjuA010952 | Green Wave | 814 | 0.4 |
| | | A03_aop2 | | | |
| CE38248 | AOP2 | BjuA010951_BjuA010952 | Green Wave | 815 | 0.08 |
| | | A03_aop2 | | | |
| CE38248 | AOP2 | BjuA010951_BjuA010952 | Green Wave | 816 | 0.39 |
| | | A03_aop2 | | | |

TABLE 4
Phenotypic data

| | | | Days | |
|---|---|---|---|---|
| | | | after | |
| CEID | Cultivar | Generation | planting | GRA |
| CE15785 | Red Giant | E0 | 56 | NA |
| CE15788 | Red Giant | E0 | 56 | NA |
| CE18322 | Red Giant | E0 | 28 | NA |
| CE18324 | Red Giant | E0 | 28 | NA |
| CE33147 | Red Giant | E0 | 18 | 0.07 |
| (CE15785 | | | | |
| clone) | | | | |
| CE33150 | Red Giant | E0 | 18 | 0.05 |
| (CE15788 | | | | |
| clone) | | | | |
| CE33152 | Red Giant | E0 | 18 | 0.23 |
| (CE18322 | | | | |
| clone) | | | | |
| CE33155 | Red Giant | E0 | 18 | 0.07 |
| (CE18324 | | | | |
| clone) | | | | |
| CE41824 | Red Giant | E1 | 19 | 0.14 |
| CE41824 | Red Giant | E1 | 36 | 0.11 |
| CE41824 | Red Giant | E1 | 44 | 0.12 |
| CE41858 | Red Giant | E1 | 19 | 0.22 |
| CE41858 | Red Giant | E1 | 36 | 0.16 |
| CE41858 | Red Giant | E1 | 44 | 0.21 |
| CE41984 | Red Giant | E1 | 19 | 0.09 |
| CE41984 | Red Giant | E1 | 28 | 0.29 |
| CE41984 | Red Giant | E1 | 36 | 0.19 |
| CE41984 | Red Giant | E1 | 44 | 0.27 |
| CE41986 | Red Giant | E1 | 19 | 0.12 |
| CE41986 | Red Giant | E1 | 28 | 0.04 |
| CE41986 | Red Giant | E1 | 36 | 0.12 |
| CE41986 | Red Giant | E1 | 44 | 0.11 |
| CE42072 | Red Giant | WT | 19 | 1.51 |
| CE42072 | Red Giant | WT | 28 | 1.51 |
| CE42073 | Red Giant | WT | 19 | 2.17 |
| CE42073 | Red Giant | WT | 28 | 1.83 |
| CE42074 | Red Giant | WT | 19 | 1.92 |
| CE42074 | Red Giant | WT | 28 | 1.66 |
| CE42075 | Red Giant | WT | 19 | 1.82 |
| CE42077 | Red Giant | WT | 19 | 2.28 |
| CE42077 | Red Giant | WT | 28 | 1.76 |
| CE42078 | Red Giant | WT | 28 | 2.24 |
| CE42082 | Red Giant | WT | 36 | 2.04 |
| CE42082 | Red Giant | WT | 44 | 2.90 |
| CE42102 | Red Giant | WT | 36 | 2.61 |
| CE42102 | Red Giant | WT | 44 | 3.14 |
| CE42107 | Red Giant | WT | 36 | 2.62 |
| CE42107 | Red Giant | WT | 44 | 2.88 |
| CE42112 | Red Giant | WT | 36 | 2.29 |
| CE42112 | Red Giant | WT | 44 | 2.87 |
| CE42117 | Red Giant | WT | 36 | 2.49 |
| CE42117 | Red Giant | WT | 44 | 2.37 |
| CE21573 | Southern Giant Curled | E0 | 47 | 0.32 |
| CE29601 | Southern Giant Curled | E0 | 27 | 0.06 |
| CE31357 | Southern Giant Curled | E0 | 25 | 0.21 |
| CE41658 | Southern Giant Curled | E1 | 19 | 0.27 |
| CE41658 | Southern Giant Curled | E1 | 28 | 0.40 |
| CE41658 | Southern Giant Curled | E1 | 36 | 0.37 |
| CE41658 | Southern Giant Curled | E1 | 44 | 0.45 |
| CE42024 | Southern Giant Curled | WT | 19 | 2.07 |
| CE42024 | Southern Giant Curled | WT | 28 | 2.63 |
| CE42025 | Southern Giant Curled | WT | 19 | 2.42 |
| CE42025 | Southern Giant Curled | WT | 28 | 2.08 |
| CE42026 | Southern Giant Curled | WT | 19 | 2.33 |
| CE42026 | Southern Giant Curled | WT | 28 | 2.01 |
| CE42027 | Southern Giant Curled | WT | 19 | 2.48 |
| CE42027 | Southern Giant Curled | WT | 28 | 2.66 |
| CE42028 | Southern Giant Curled | WT | 19 | 1.08 |
| CE42028 | Southern Giant Curled | WT | 28 | 2.33 |
| CE42048 | Southern Giant Curled | WT | 36 | 2.26 |
| CE42048 | Southern Giant Curled | WT | 44 | 3.55 |
| CE42052 | Southern Giant Curled | WT | 36 | 2.66 |
| CE42052 | Southern Giant Curled | WT | 44 | 2.97 |
| CE42062 | Southern Giant Curled | WT | 36 | 2.68 |
| CE42062 | Southern Giant Curled | WT | 44 | 3.06 |
| CE42066 | Southern Giant Curled | WT | 36 | 2.70 |
| CE42066 | Southern Giant Curled | WT | 44 | 3.10 |
| CE42071 | Southern Giant Curled | WT | 36 | 2.49 |
| CE42071 | Southern Giant Curled | WT | 44 | 2.89 |

TABLE 5
Loci and associated sequence identifier
in three Brassica juncea varieties

| SEQ ID | | |
|---|---|---|
| NO: | Locus | Cultivar |
| 680 | A01.1-myr | Green_Wave |
| 681 | A01.1-myr | Southern_Giant_Curled |
| 682 | A01.1-myr | Red_Giant |
| 683 | A02.1-myr | Green_Wave |
| 684 | A02.1-myr | Red_Giant |
| 685 | A02.1-myr | Southern_Giant_Curled |
| 686 | A02.3-myr | Green_Wave |
| 687 | A02.3-myr | Red_Giant |
| 688 | A02.3-myr | Southern_Giant_Curled |
| 689 | A02.2-myr | Green_Wave |
| 690 | A02.2-myr | Red_Giant |
| 691 | A02.2-myr | Southern_Giant_Curled |
| 692 | A03.1-myr | Green_Wave |
| 693 | A03.1-myr | Red_Giant |
| 694 | A03.1-myr | Southern_Giant_Curled- |
| 695 | A09.1-myr | Green_Wave |
| 696 | A09.1-myr | Red_Giant |
| 697 | A09.1-myr | Southern_Giant_Curled |
| 698 | B04_cl3.1-myr | Green_Wave |
| 699 | B04_cl3.1-myr | Red_Giant |
| 700 | B04_cl3.1-myr | Southern_Giant_Curled |
| 701 | B04_cl1.1-myr | Green_Wave |
| 702 | B04_cl1.1-myr | Red_Giant- |
| 703 | B04_cl1.1-myr | Southern_Giant_Curled |
| 704 | B04_cl1.2-myr | Green_Wave |
| 705 | B04_cl1.2-myr | Red_Giant |
| 706 | B04_cl1.2-myr | Southern_Giant_Curled |
| 707 | B04_cl1.3-myr | Green_Wave |
| 708 | B04_cl1.3-myr | Red_Giant |
| 709 | B04_cl1.3-myr | Southern_Giant_Curled |
| 710 | B04_cl1.4-myr | Green_Wave |
| 711 | B04_cl1.4-myr | Red_Giant |
| 712 | B04_cl1.4-myr | Southern_Giant_Curled |
| 713 | B04_cl2.1-myr | Green_Wave |
| 714 | B04_cl2.1-myr | Red_Giant |
| 715 | B04_cl2.1-myr | Southern_Giant_Curled |
| 716 | B07.1-myr | Green_Wave |
| 717 | B07.1-myr | Red_Giant |
| 718 | B07.1-myr | Southern_Giant_Curled |
| 719 | B07.2-myr | Green_Wave |
| 720 | B07.2-myr | Red_Giant |
| 721 | B07.2-myr | Southern_Giant_Curled |
| 722 | BjuA007827_AOP2 | Green_Wave |
| 723 | BjuA007827_AOP2 | Red_Giant |
| 724 | BjuA007827_AOP2 | Southern_Giant_Curled |
| 725 | BjuA010951_BjuA010952_AOP2 | Green_Wave |
| 726 | BjuA010951_BjuA010952_AOP2 | |
| | Red_Giant | |
| 727 | BjuA010951_BjuA010952_AOP2 | Southern_Giant_Curled |
| 728 | BjuA031496_AOP2 | Green_Wave |
| 729 | BjuA031496_AOP2 | Southern_Giant_Curled |
| 730 | BjuA031496_AOP2 | Red_Giant |
| 731 | BjuB000368_AOP2 | Green_Wave |
| 732 | BjuB000368_AOP2 | Red_Giant |
| 733 | BjuB000368_AOP2 | Southern_Giant_Curled |
| 734 | BjuB018584_AOP2 | Green_Wave |
| 735 | BjuB018584_AOP2 | Red_Giant |
| 736 | BjuB018584_AOP2 | Southern_Giant_Curled |
| 737 | BjuA022066-Cyp79fl | Green_Wave |
| 738 | BjuA022066-Cyp79fl | Red_Giant |
| 739 | BjuA022066-Cyp79fl | Southern_Giant_Curled |
| 740 | BjuB021730-Cyp79fl | Green_Wave |
| 741 | BjuB021730-Cyp79fl | Red_Giant |
| 742 | BjuB021730-Cyp79fl | Southern_Giant_Curled |

The application's sequence listing, which the Patent Office published only in electronic form, follows.

SEQUENCE LISTING (816 sequences)

SEQ ID NO: 1 - protein, 1227 aa, Unknown
  Lachnospiraceae bacterium
SKLEKFTNCYSLSKTLRFKAIPVGKTQENIDNKRLLVEDEKRAEDYKGVKKLLDRYYLSFINDVLHSIKLKNLNNYISLFRKKTRTEKENKELENLEINLRKEIAKAFKGNEGYKSLFKKDIIETILPEFLDDKDEIALVNSFNGFTTAFTGFFDNRENMFSEEAKSTSIAFRCINENLTRYISNMDIFEKVDAIFDKHEVQEIKEKILNSDYDVEDFFEGEFFNFVLTQEGIDVYNAIIGGFVTESGEKIKGLNEYINLYNQKTKQKLPKFKPLYKQVLSDRESLSFYGEGYTSDEEVLEVFRNTLNKNSEIFSSIKKLEKLFKNFDEYSSAGIFVKNGPAISTISKDIFGEWNVIRDKWNAEYDDIHLKKKAVVTEKYEDDRRKSFKKIGSFSLEQLQEYADADLSVVEKLKEIIIQKVDEIYKVYGSSEKLFDADFVLEKSLKKNDAVVAIMKDLLDSVKSFENYIKAFFGEGKETNRDESFYGDFVLAYDILLKVDHIYDAIRNYVTQKPYSKDKFKLYFQNPQFMGGWDKDKETDYRATILRYGSKYYLAIMDKKYAKCLQKIDKDDVNGNYEKINYKLLPGPNKMLPKVFFSKKWMAYYNPSEDIQKIYKNGTFKKGDMFNLNDCHKLIDFFKDSISRYPKWSNAYDFNFSETEKYKDIAGFYREVEEQGYKVSFESASKKEVDKLVEEGKLYMFQIYNKDFSDKSHGTPNLHTMYFKLLFDENNHGQIRLSGGAELFMRRASLKKEELVVHPANSPIANKNPDNPKKTTTLSYDVYKDKRFSEDQYELHIPIAINKCPKNIFKINTEVRVLLKHDDNPYVIGIARGERNLLYIVVVDGKGNIVEQYSLNEIINNFNGIRIKTDYHSLLDKKEKERFEARQNWTSIENIKELKAGYISQVVHKICELVEKYDAVIALEDLNSGFKNSRVKVEKQVYQKFEKMLIDKLNYMVDKKSNPCATGGALKGYQITNKFESFKSMSTQNGFIFYIPAWLTSKIDPSTGFVNLLKTKYTSIADSKKFISSFDRIMYVPEEDLFEFALDYKNFSRTDADYIKKWKLYSYGNRIRIFRNPKKNNVFDWEEVCLTSAYKELFNKYGINYQQGDIRALLCEQSDKAFYSSFMALMSLMLQMRNSITGRTDVDFLISPVKNSDGIFYDSRNYEAQENAILPKNADANGAYNIARKVLWAIGQFKKAEDEKLDKVKIAISNKEWLEYAQTSVKH

SEQ ID NO: 2 - protein, 1307 aa, Acidaminococcus sp.
MTQFEGFTNLYQVSKTLRFELIPQGKTLKHIQEQGFIEEDKARNDHYKELKPIIDRIYKTYADQCLQLVQLDWENLSAAIDSYRKEKTEETRNALIEEQATYRNAIHDYFIGRTDNLTDAINKRHAEIYKGLFKAELFNGKVLKQLGTVTTTEHENALLRSFDKFTTYFSGFYENRKNVFSAEDISTAIPHRIVQDNFPKFKENCHIFTRLITAVPSLREHFENVKKAIGIFVSTSIEEVFSFPFYNQLLTQTQIDLYNQLLGGISREAGTEKIKGLNEVLNLAIQKNDETAHIIASLPHRFIPLFKQILSDRNTLSFILEEFKSDEEVIQSFCKYKTLLRNENVLETAEALFNELNSIDLTHIFISHKKLETISSALCDHWDTLRNALYERRISELTGKITKSAKEKVQRSLKHEDINLQEIISAAGKELSEAFKQKTSEILSHAHAALDQPLPTTLKKQEEKEILKSQLDSLLGLYHLLDWFAVDESNEVDPEFSARLTGIKLEMEPSLSFYNKARNYATKKPYSVEKFKLNFQMPTLASGWDVNKEKNNGAILFVKNGLYYLGIMPKQKGRYKALSFEPTEKTSEGFDKMYYDYFPDAAKMIPKCSTQLKAVTAHFQTHTTPILLSNNFIEPLEITKEIYDLNNPEKEPKKFQTAYAKKTGDQKGYREALCKWIDFTRDFLSKYTKTTSIDLSSLRPSSQYKDLGEYYAELNPLLYHISFQRIAEKEIMDAVETGKLYLFQIYNKDFAKGHHGKPNLHTLYWTGLFSPENLAKTSIKLNGQAELFYRPKSRMKRMAHRLGEKMLNKKLKDQKTPIPDTLYQELYDYVNHRLSHDLSDEARALLPNVITKEVSHEIIKDRRFTSDKFFFHVPITLNYQAANSPSKFNQRVNAYLKEHPETPIIGIDRGERNLIYITVIDSTGKILEQRSLNTIQQFDYQKKLDNREKERVAARQAWSVVGTIKDLKQGYLSQVIHEIVDLMIHYQAVVVLENLNFGFKSKRTGIAEKAVYQQFEKMLIDKLNCLVLKDYPAEKVGGVLNPYQLTDQFTSFAKMGTQSGFLFYVPAPYTSKIDPLTGFVDPFVWKTIKNHESRKHFLEGFDFLHYDVKTGDFILHFKMNRNLSFQRGLPGFMPAWDIVFEKNETQFDAKGTPFIAGKRIVPVIENHRFTGRYRDLYPANELIALLEEKGIVFRDGSNILPKLLENDDSHAIDTMVALIRSVLQMRNSNAATGEDYINSPVRDLNGVCFDSRFQNPEWPMDADANGAYHIALKGQLLLNHLKESKDLKLQNGISNQDWLAYIQELRN

SEQ ID NO: 3 - protein, 1241 aa, Butyrivibrio proteoclasticus
MLLYENYTKRNQITKSLRLELRPQGKTLRNIKELNLLEQDKAIYALLERLKPVIDEGIKDIARDTLKNCELSFEKLYEHFLSGDKKAYAKESERLKKEIVKTLIKNLPEGIGKISEINSAKYLNGVLYDFIDKTHKDSEEKQNILSDILETKGYLALFSKFLTSRITTLEQSMPKRVIENFEIYAANIPKMQDALERGAVSFAIEYESICSVDYYNQILSQEDIDSYNRLISGIMDEDGAKEKGINQTISEKNIKIKSEHLEEKPFRILKQLHKQILEEREKAFTIDHIDSDEEVVQVTKEAFEQTKEQWENIKKINGFYAKDPGDITLFIVVGPNQTHVLSQLIYGEHDRIRLLLEEYEKNTLEVLPRRTKSEDARYDKFVNAVPKKVAKESHTFDGLQKMTGDDRLFILYRDELARNYMRIKEAYGTFERDILKSRRGIKGNRDVQESLVSFYDELTKFRSALRIINSGNDEKADPIFYNTFDGIFEKANRTYKAENLCRNYVTKSPADDARIMASCLGTPARLRTHWWNGEENFAINDVAMIRRGDEYYYFVLTPDVKPVDLKTKDETDAQIFVQRKGAKSFLGLPKALFKCILEPYFESPEHKNDKNCVIEEYVSKPLTIDRRAYDIFKNGTFKKTNIGIDGLTEEKFKDDCRYLIDVYKEFIAVYTRYSCFNMSGLKRADEYNDIGEFFSDVDTRLCTMEWIPVSFERINDMVDKKEGLLFLVRSMFLYNRPRKPYERTFIQLFSDSNMEHTSMLLNSRAMIQYRAASLPRRVTHKKGSILVALRDSNGEHIPMHIREAIYKMKNNFDISSEDFIMAKAYLAEHDVAIKKANEDIIRNRRYTEDKFFLSLSYTKNADISARTLDYINDKVEEDTQDSRMAVIVTRNLKDLTYVAVVDEKNNVLEEKSLNEIDGVNYRELLKERTKIKYHDKTRLWQYDVSSKGLKEAYVELAVTQISKLATKYNAVVVVESMSSTFKDKFSFLDEQIFKAFEARLCARMSDLSFNTIKEGEAGSISNPIQVSNNNGNSYQDGVIYFLNNAYTRTLCPDTGFVDVFDKTRLITMQSKRQFFAKMKDIRIDDGEMLFTFNLEEYPTKRLLDRKEWTVKIAGDGSYFDKDKGEYVYVNDIVREQIIPALLEDKAVFDGNMAEKFLDKTAISGKSVELIYKWFANALYGIITKKDGEKIYRSPITGTEIDVSKNTTYNFGKKFMFKQEYRGDGDFLDAFLNYMQAQDIAV

SEQ ID NO: 4 - protein, 1238 aa, Candidatus Methanoplasma termitum
MNNYDEFTKLYPIQKTIRFELKPQGRTMEHLETFNFFEEDRDRAEKYKILKEAIDEYHKKFIDEHLTNMSLDWNSLKQISEKYYKSREEKDKKVFLSEQKRMRQEIVSEFKKDDRFKDLFSKKLFSELLKEEIYKKGNHQEIDALKSFDKFSGYFIGLHENRKNMYSDGDEITAISNRIVNENFPKFLDNLQKYQEARKKYPEWIIKAESALVAHNIKMDIVFSLEYFNKVLNQEGIQRYNLALGGYVTKSGEKMMGLNDALNLAHQSEKSSKGRIHMTPLFKQILSEKESFSYIPDVFTEDSQLLPSIGGFFAQIENDKDGNIFDRALELISSYAEYDTERIYIRQADINRVSNVIFGEWGTLGGLMREYKADSINDINLERTCKKVDKWLDSKEFALSDVLEAIDRTGNNDAFNEYISKMRTAREKIDAARKEMKFISEKISGDEESIHIIKTLLDSVQQFLHFFNLFKARQDIPLDGAFYAEFDEVHSKLFAIVPLYNKVRNYLTKNNLNTKKIKLNFKNPTLANGWDQNKVYDYASLIFLRDGNYYLGIINPKRKKNIKFEQGSGNGPFYRKMVYKQIPGPNKNLRPVFLTSTKGKKEYKPSKEIIEGYEADKHIRGDKFDLDFCHKLIDFFKESIEKHKDWSKFNFYFSPTESYGDISEFYLDVEKQGYRMHFENISAETIDEYVEKGDLFLFQIYNKDFVKAATGKKDMHTIYWNAAFSPENLQDVVVKLNGEAELFYRDKSDIKEIVHREGEILVNRTYNGRTPVPDKIHKKLTDYHNGRTKDLGEAKEYLDKVRYFKAHYDITKDRRYLNDKIYFHVPLTLNFKANGKKNLNKMVIEKFLSDEKAHIIGIDRGERNLLYYSIIDRSGKIIDQQSLNVIDGFDYREKLNQREIEMKDARQSWNAIGKIKDLKEGYLSKAVHEITKMAIQYNAIVVMEELNYGFKRGRFKVEKQIYQKFENMLIDKMNYLVFKDAPDESPGGVLNAYQLTNPLESFAKLGKQTGILFYVPAAYTSKIDPTTGFVNLFNTSSKTNAQERKEFLQKFESISYSAKDGGIFAFAFDYRKFGTSKTDHKNVWTAYTNGERMRYIKEKKRNELFDPSKEIKEALTSSGIKYDGGQNILPDILRSNNNGLIYTMYSSFIAAIQMRVYDGKEDYIISPIKNSKGEFFRTDPKRRELPIDADANGAYNIALRGELTMRAIAEKFDPDSEKMAKLELKHKDWFEFMQTRGD

SEQ ID NO: 5 - protein, 1281 aa, Eubacterium eligens
MNGNRSIVYREFVGVIPVAKTLRNELRPVGHTQEHIIQNGLIQEDELRQEKSTELKNIMDDYYREYIDKSLSGVTDLDFTLLFELMNLVQSSPSKDNKKALEKEQSKMREQICTHLQSDSNYKNIFNAKLLKEILPDFIKNYNQYDVKDKAGKLETLALFNGFSTYFTDFFEKRKNVFTKEAVSTSIAYRIVHENSLIFLANMTSYKKISEKALDEIEVIEKNNQDKMGDWELNQIFNPDFYNMVLIQSGIDFYNEICGVVNAHMNLYCQQTKNNYNLFKMRKLHKQILAYTSTSFEVPKMFEDDMSVYNAVNAFIDETEKGNIIGKLKDIVNKYDELDEKRIYISKDFYETLSCFMSGNWNLITGCVENFYDENIHAKGKSKEEKVKKAVKEDKYKSINDVNDLVEKYIDEKERNEFKNSNAKQYIREISNIITDTETAHLEYDDHISLIESEEKADEMKKRLDMYMNMYHWAKAFIVDEVLDRDEMFYSDIDDIYNILENIVPLYNRVRNYVTQKPYNSKKIKLNFQSPTLANGWSQSKEFDNNAIILIRDNKYYLAIFNAKNKPDKKIIQGNSDKKNDNDYKKMVYNLLPGANKMLPKVFLSKKGIETFKPSDYIISGYNAHKHIKTSENFDISFCRDLIDYFKNSIEKHAEWRKYEFKFSATDSYSDISEFYREVEMQGYRIDWTYISEADINKLDEEGKIYLFQIYNKDFAENSTGKENLHTMYFKNIFSEENLDKIIKLNGQAELFYRRASVKNPVKHKKDSVLVNKTYKNQLDNGDVVRIPIPDDIYNEIYKMYNGYIKESDLSEAAKEYLDKVEVRTAQKDIVKDYRYTVDKYFIHTPITINYKVTARNNVNDMVVKYIAQNDDIHVIGIDRGERNLIYISVIDSHGNIVKQKSYNILNNYDYKKKLVEKEKTREYARKNWKSIGNIKELKEGYISGVVHEIAMLIVEYNAIIAMEDLNYGFKRGRFKVERQVYQKFESMLINKLNYFASKEKSVDEPGGLLKGYQLTYVPDNIKNLGKQCGVIFYVPAAFTSKIDPSTGFISAFNFKSISTNASRKQFFMQFDEIRYCAEKDMFSFGFDYNNFDTYNITMGKTQWTVYTNGERLQSEFNNARRTGKTKSINLTETIKLLLEDNEINYADGHDIRIDMEKMDEDKKSEFFAQLLSLYKLTVQMRNSYTEAEEQENGISYDKIISPVINDEGEFFDSDNYKESDDKECKMPKDADANGAYCIALKGLYEVLKIKSEWTEDGFDRNCLKLPHAEWLDFIQNKRYE

SEQ ID NO: 6 - protein, 1300 aa, Francisella novicida
MSIYQEFVNKYSLSKTLRFELIPQGKTLENIKARGLILDDEKRAKDYKKAKQIIDKYHQFFIEEILSSVCISEDLLQNYSDVYFKLKKSDDDNLQKDFKSAKDTIKKQISEYIKDSEKFKNLFNQNLIDAKKGQESDLILWLKQSKDNGIELFKANSDITDIDEALEIIKSFKGWTTYFKGFHENRKVNYSSNDIPTSIIYRIVDDNLPKFLENKAKYESLKDKAPEAINYEQIKKDLAEELTFDIDYKTSEVNQRVFSLDEVFEIANFNNYLNQSGITKFNTIIGGKFVNGENTKRKGINEYINLYSQQINDKTLKKYKMSVLFKQILSDTESKSFVIDKLEDDSDVVTTMQSFYEQIAAFKTVEEKSIKETLSLLFDDLKAQKLDLSKIYFKNDKSLTDLSQQVFDDYSVIGTAVLEYITQQIAPKNLDNPSKKEQELIAKKTEKAKYLSLETIKLALEEFNKHRDIDKQCRFEEILANFAAIPMIFDEIAQNKDNLAQISIKYQNQGKKDLLQASAEDDVKAIKDLLDQTNNLLHKLKIFHISQSEDKANILDKDEHFYLVFEECYFELANIVPLYNKIRNYITQKPYSDEKFKLNFENSTLANGWDKNKEPDNTAILFIKDDKYYLGVMNKKNNKIFDDKAIKENKGEGYKKIVYKLLPGANKMLPKVFFSAKSIKFYNPSEDILRIRNHSTHTKNGSPQKGYEKFEFNIEDCRKFIDFYKQSISKHPEWKDFGFRFSDTQRYNSIDEFYREVENQGYKLTFENISESYIDSVVNQGKLYLFQIYNKDFSAYSKGRPNLHTLYWKALFDERNLQDVVYKLNGEAELFYRKQSIPKKITHPAKEAIANKNKDNPKKESVFEYDLIKDKRFTEDKFFFHCPITINFKSSGANKFNDEINLLLKEKANDVHILSIDRGERHLAYYTLVDGKGNIIKQDTFNIIGNDRMKTNYHDKLAAIEKDRDSARKDWKKINNIKEMKEGYLSQVVHEIAKLVIEYNAIVVFEDLNFGFKRGRFKVEKQVYQKLEKMLIEKLNYLVFKDNEFDKTGGVLRAYQLTAPFETFKKMGKQTGIIYYVPAGFTSKICPVTGFVNQLYPKYESVSKSQEFFSKFDKICYNLDKGYFEFSFDYKNFGDKAAKGKWTIASFGSRLINFRNSDKNHNWDTREVYPTKELEKLLKDYSIEYGHGECIKAAICGESDKKFFAKLTSVLNTILQMRNSKTGTELDYLISPVADVNGNFFDSRQAPKNMPQDADANGAYHIGLKGLMLLGRIKNNQEGKKLNLVIKNEEYFEFVQNRNN

SEQ ID NO: 7 - protein, 1206 aa, Unknown
  Lachnospiraceae bacterium
MYYESLTKQYPVSKTIRNELIPIGKTLDNIRQNNILESDVKRKQNYEHVKGILDEYHKQLINEALDNCTLPSLKIAAEIYLKNQKEVSDREDFNKTQDLLRKEVVEKLKAHENFTKIGKKDILDLLEKLPSISEDDYNALESFRNFYTYFTSYNKVRENLYSDKEKSSTVAYRLINENFPKFLDNVKSYRFVKTAGILADGLGEEEQDSLFIVETFNKTLTQDGIDTYNSQVGKINSSINLYNQKNQKANGFRKIPKMKMLYKQILSDREESFIDEFQSDEVLIDNVESYGSVLIESLKSSKVSAFFDALRESKGKNVYVKNDLAKTAMSVIVFENWRTFDDLLNQEYDLANENKKKDDKYFEKRQKELKKNKSYSLEHLCNLSEDSCNLIENYIHQISDDIENIIINNETFLRIVINEHDRSRKLAKNRKAVKAIKDFLDSIKVLERELKLINSSGQELEKDLIVYSAHEELLVELKQVDSLYNMTRNYLTKKPFSTEKVKLNFNRSTLLNGWDRNKETDNLGVLLLKDGKYYLGIMNTSANKAFVNPPVAKTEKVFKKVDYKLLPVPNQMLPKVFFAKSNIDFYNPSSEIYSNYKKGTHKKGNMFSLEDCHNLIDFFKESISKHEDWSKFGFKFDTQASYNDISEFYREVEKQGYKLTYTDIDETYINDLIERNELYLFQIYNKDFSMYSKGKLNLHTLYFMMLFDQRNIDDVVYKLNGEAEVFYRPASISEDELIIHKAGEEIKNKNPNRARTKETSTFSYDIVKDKRYSKDKFTLHIPITMNFGVDEVKRFNDAVNSAIRIDENVNVIGIDRGERNLLYVVVIDSKGNILEQISLNSIINKEYDIETDYHALLDEREGGRDKARKDWNTVENIRDLKAGLYLQVVNVVAKLVLKYNAIICLEDLNFGFKRGRQKVEKQVYQKFEKMLIDKLNYLVIDKSREQTSPKELGGALNALQLTSKFKSFKELGKQSGVIYYVPAYLTSKIDPTTGFANLFYMKCENVEKSKRFFDGFDFIRFNALENVFEFGFDYRSFTQRACGINSKWTVCTNGERIIKYRNPDKNNMFDEKVVVVTDEMKNLFEQYKIPYEDGRNVKDMIISNEEAEFYRRLYRLLQQTLQMRNSTSDGTRDYIISPVKNKREAYFNSELSDGSVPKDADANGAYNIARKGLWVLEQIRQKSEGEKINLAMTNAEWLEYAQTHLL

SEQ ID NO: 8 - protein, 1233 aa, Unknown
  Lachnospiraceae bacterium
MDYGNGQFERRAPLTKTITLRLKPIGETRETIREQKLLEQDAAFRKLVETVTPIVDDCIRKIADNALCHFGTEYDFSCLGNAISKNDSKAIKKETEKVEKLLAKVLTENLPDGLRKVNDINSAAFIQDTLTSFVQDDADKRVLIQELKGKTVLMQRFLTTRITALTVWLPDRVFENFNIFIENAEKMRILLDSPLNEKIMKFDPDAEQYASLEFYGQCLSQKDIDSYNLIISGIYADDEVKNPGINEIVKEYNQQIRGDKDESPLPKLKKLHKQILMPVEKAFFVRVLSNDSDARSILEKILKDTEMLPSKIIEAMKEADAGDIAVYGSRLHELSHVIYGDHGKLSQIIYDKESKRISELMETLSPKERKESKKRLEGLEEHIRKSTYTFDELNRYAEKNVMAAYIAAVEESCAEIMRKEKDLRTLLSKEDVKIRGNRHNTLIVKNYFNAWTVFRNLIRILRRKSEAEIDSDFYDVLDDSVEVLSLTYKGENLCRSYITKKIGSDLKPEIATYGSALRPNSRWWSPGEKFNVKFHTIVRRDGRLYYFILPKGAKPVELEDMDGDIECLQMRKIPNPTIFLPKLVFKDPEAFFRDNPEADEFVFLSGMKAPVTITRETYEAYRYKLYTVGKLRDGEVSEEEYKRALLQVLTAYKEFLENRMIYADLNFGFKDLEEYKDSSEFIKQVETHNTFMCWAKVSSSQLDDLVKSGNGLLFEIWSERLESYYKYGNEKVLRGYEGVLLSILKDENLVSMRTLLNSRPMLVYRPKESSKPMVVHRDGSRVVDRFDKDGKYIPPEVHDELYRFFNNLLIKEKLGEKARKILDNKKVKVKVLESERVKWSKFYDEQFAVTFSVKKNADCLDTTKDLNAEVMEQYSESNRLILIRNTTDILYYLVLDKNGKVLKQRSLNIINDGARDVDWKERFRQVTKDRNEGYNEWDYSRTSNDLKEVYLNYALKEIAEAVIEYNAILIIEKMSNAFKDKYSFLDDVTFKGFETKKLAKLSDLHFRGIKDGEPCSFTNPLQLCQNDSNKILQDGVIFMVPNSMTRSLDPDTGFIFAINDHNIRTKKAKLNFLSKFDQLKVSSEGCLIMKYSGDSLPTHNTDNRVWNCCCNHPITNYDRETKKVEFIEEPVEELSRVLEENGIETDTELNKLNERENVPGKVVDAIYSLVLNYLRGTVSGVAGQRAVYYSPVTGKKYDISFIQAMNLNRKCDYYRIGSKERGEWTDFVAQLIN

SEQ ID NO: 9 - protein, 1227 aa, Unknown
  Lachnospiraceae bacterium
MSKLEKFTNCYSLSKTLRFKAIPVGKTQENIDNKRLLVEDEKRAEDYKGVKKLLDRYYLSFINDVLHSIKLKNLNNYISLFRKKTRTEKENKELENLEINLRKEIAKAFKGNEGYKSLFKKDIIETILPEFLDDKDEIALVNSFNGFTTAFTGFFDNRENMFSEEAKSTSIAFRCINENLTRYISNMDIFEKVDAIFDKHEVQEIKEKILNSDYDVEDFFEGEFFNFVLTQEGIDVYNAIIGGFVTESGEKIKGLNEYINLYNQKTKQKLPKFKPLYKQVLSDRESLSFYGEGYTSDEEVLEVFRNTLNKNSEIFSSIKKLEKLFKNFDEYSSAGIFVKNGPAISTISKDIFGEWNVIRDKWNAEYDDIHLKKKAVVTEKYEDDRRKSFKKIGSFSLEQLQEYADADLSVVEKLKEIIIQKVDEIYKVYGSSEKLFDADFVLEKSLKKNDAVVAIMKDLLDSVKSFENYIKAFFGEGKETNRDESFYGDFVLAYDILLKVDHIYDAIRNYVTQKPYSKDKFKLYFQNPQFMGGWDKDKETDYRATILRYGSKYYLAIMDKKYAKCLQKIDKDDVNGNYEKINYKLLPGPNKMLPKVFFSKKWMAYYNPSEDIQKIYKNGTFKKGDMFNLNDCHKLIDFFKDSISRYPKWSNAYDFNFSETEKYKDIAGFYREVEEQGYKVSFESASKKEVDKLVEEGKLYMFQIYNKDFSDKSHGTPNLHTMYFKLLFDENNHGQIRLSGGAELFMRRASLKKEELVVHPANSPIANKNPDNPKKTTTLSYDVYKDKRFSEDQYELHIPIANINKCPKNIFKINTEVRVLLKHDDNPYVIGIDRGERNLLYIVVVDGKGNIVEQYSLNEIINNFNGIRIKTDYHSLLDKKEKERFEARQNWTSIENIKELKAGYISQVVHKICELVEKYDAVIALEDLNSGFKNSRVKVEKQVYQKFEKMLIDKLNYMVDKKSNPCATGGALKGYQITNKFESFKSMSTQNGFIFYIPAWLTSKIDPSTGFVNLLKTKYTSIADKKFISSFDRIMYVPEEDLFEFALDYKNFSRTDADYIKKWKLYSYGNRIRIFRNPKKNNVFDWEEVCLTSAYKELFNKYGINYQQGDIRALLCEQSDKAFYSSFMALMSLMLQMRNSITGRTDVDFLISPVKNSDGIFYDSRNYEAQENAILPKNADANGAYNIARKVLWAIGQFKKAEDEKLDKVKIASNKEWLEYAQTSVKH

SEQ ID NO: 10 - protein, 1264 aa, Unknown
  Lachnospiraceae bacterium
MEDYSGFVNIYSIQKTLRFELKPVGKTLEHIEKKGFLKKDKIRAEDYKAVKKIIDKYHRAYIEEVFDSVLHQKKKKDKTRFSTQFIKEIKEFSELYYKTEKNIPDKERLEALSEKLRKMLVGAFKGEFSEEVAEKYNKNLFSKELIRNEIEKFCETDEERKQVSNFKSFTTYFTGFHSNRQNIYSDEKKSTAIGYRIIHQNLPKFLDNLKIIESIQRRFKDFPWSDLKKNLKKIDKNIKLTEYFSIDGFVNVLNQKGIDAYNTILGGKSEESGEKIQGLNEYINLYRQKNNIDRKNPLNVKILFKQILGDRETKSFIPEAFPDDQSVLNSITEFAKYLKLDKKKKSIIAELKKFLSSFNRYELDGIYLANDNSLASISTFLFDDWSFIKKSVSFKYDESVGDPKKKIKSPLKYEKEKEKWLKQKYYTISFLNDAIESYSKSQDEKRVKIRLEAYFAEFKSKDDAKKQFDLLERIEEAYAIVEPLLGAEYPRDRNLKADKKEVGKIKDFLDSIKSLQFFLKPLLSAEIFDEKDLGFYNQLEGYYEEIDISGHLYNKVRNYLTGKIYSKEKFKLNFENSTLLKGWDENREVANLCVIFREDQKYYLGVMDKENNTILSDIPKVKPNELFYEKMVYKLIPTPHMQLPRIIFSSDNLSIYNPSKSILKIREAKSFKEGKNFKLKDCHKFIDFYKESISKNEDWSRFDFKFSKTSSYENISEFYREVERQGYNLDFKKVSKFYIDSLVEDGKLYLFQIYNKDFSIFSKGKPNLHTIYFRSLFSKENLKDVCLKLNGEAEMFFRKKSINYDEKKKREGHHPELFEKLKYPILKDKRYSEDKFQFHLPISLNFKSKERLNFNLKVNEFLKRNKDINIIGIDRGERNLLYLVMINQKGEILKQTLLDSMQSGKGRPEINYKEKLQEKEIERDKARKSWGTVENIKELKEGYLSIVIHQISKLMVENNAIVVLEDLNIGFKRGRQKVERQVYQKFEKMLIDKLNFLVFKENKPTEPGGVLKAYQLTDEFQSFEKLSKQTGFLFYVPSWNTSKIDPRTGFIDFLHPAYENIEKAKQWINKFDSIRFNSKMDWFEFTADTRKFSENLMLGKNRVWVICTTNVERYFTSKTANSSIQYNSIQITEKLKELFVDIPFSNGQDLKPEILRKNDAVFFKSLLFYIKTTLSLRQNNGKKGEEEKDFILSPVVDSKGRFFNSLEASDDEPKDADANGAYHIALKGLMNLLVLNETKEENLSRPKWKIKNKDWLEFVWERNR

SEQ ID NO: 11 - protein, 1373 aa, Moraxella bovoculi
MLFQDFTHLYPLSKTVRFELFIDRTLEHIHAKNFLSQDETMADMHQKVKVILDDYHRDFIADMMGEVKLTKLAEFYDVYLKFRKNPKDDELQKAQLKDLQAVLRKEIVKPIGNGGKYKAGYDRLFGAKLFKDGKELGDLAKFVIAQEGESSPKLAHLAHFEKFSTYFTGFHDNRKNMYSDEDKHTAIAYRLIHENLPRFIDNLQILTTIKQKHSALYDQIINELTASGLDVSLASHLDGYHKLLTQEGITAYNTLLGGISGEAGSPKIQGINELINSHHNQHCHKSERIAKLRPLHKQILSDGMSVSFLPSKFADDSEMCQAVNEFYRHYADVFAKVQSLFDGFDDHQKDGIYVEHKNLNELSKQAFGDFALLGRVLDGYYVDVVNPEFNERFAKAKTDNAKAKLTKEKDKFIKGVHSLASLEQAIEHYTARHDDESVQAGKLGQYFKHGLAGVDNPIQKIHNNHSTIKGFLERERPAGERALPKIKSGKNPEMTQLRQLKELLDNALNVAHFAKLLTTKTTLDNQDGNFYGEFGVLYDELAKIPTLYNKVRDYLSQKPFSTEKYKLNFGNPTLLNGWDLNKEKDNFGVILQKDGCYYLALLDKAHKKVFDNAPNTGKSIYQKMIYKYLEVRKQFPKVFFSKEAIAINYHPSKELVEIKDKGRQRSDDERLKLYRFILECLKIHPKYDKKFEGAIGDIQLFKKDKKGREVPISEKDLFKDINGIFSSKPKLEMEDFFIGEFKRYNPSQDLVDQYNIYKKIDSNDNRKKENFYNNHPKFKKDLVRYYYESMCKHEEWEESFEFSKKLQDIGCYVDVNELFTEIETRRLNYKISFCNINADYIDELVEQGQLYLFQIYNKDFSPKAHGKPNLHTLYFKALFSEDNLADPIYKLNGEAQIFYRKASLDMNETTIHRAGEVLENKNPDNPKKRQFVYDIIKDKRYTQKDFMLHVPITMNFGVQGMTIKEFNKKVNQSIQQYDEVNVIGIDRGERHLLYLTVINSKGEILEQCSLNDITTASANGTQMTTPYHKILDKREIERLNARVGWGEIETIKELKSGYLSHVVHQISQLMLKYNAIVVLEDLNFGFKRGRFKVEKQIYQNFENALIKKLNHLVLKDKADDEIGSYKNALQLTNNFTDLKSIGKQTGFLFYVPAWNTSKIDPETGFVDLLKPRYENIQASQAFFGKFDKICYNADKDYFEFHIDYAKFTDKAKNSRQIWTICSHGDKRYVYDKTANQNKGAAKGINVNDILKSLFARHHINEKQPNLVMDICQNNDKEFHKSLMYLLKTLLALRYSNASSDEDFILSPVANDEGVFFNSALADDTQPQNADANGAYHIALKGLWLLNELKNSDDLNKVKLAIDNQTWLNFAQNR

SEQ ID NO: 12 - protein, 1352 aa, Unknown
  Parcubacteria bacterium
MENIFDQFIGKYSLSKTLRFELKPVGKTEDFLKINKVFEKDQTIDDSYNQAKFYFDSLHQKFIDAALASDKTSELSFQNFADVLEKQNKIILDKKREMGALRKRDKNAVGIDRLQKEINDAEDIIQKEKEKIYKDVRTLFDNEAESWKTYYQEREVDGKKITESKADLKQKGADFLTAAGILKVLKYEFPEEKEKEFQAKNQPSLFVEEKENPGQKRYIFDSFDKFAGYLTKFQQTKKNLYAADGTSTAVATRIADNFIIFHQNTKVFRDKYKNNHTDLGFDEENIFEIERYKNCLLQREIEHIKNENSYNKIIGRINKKIKEYRDQKAKDTKLTKSDFPFFKNLDKQILGEVEKEKQLIEKTREKTEEDVLIERFKEFIENNEERFTAAKKLMNAFCNGEFESEYEGIYLKNKAINTISRRWFVSDRDFELKLPQQKSKNKSEKNEPKVKKFISIAEIKNAVEELDGDIFKAVFYDKKIIAQGGSKLEQFLVIWKYEFEYLFRDIERENGEKLLGYDSCLKIAKQLGIFPQEKEAREKATAVIKNYADAGLGIFQMMKYFSLDDKDRKNTPGQLSTNFYAEYDGYYKDFEFIKYYNEFRNFITKKPFDEDKIKLNFENGALLKGWDENKEYDFMGVILKKEGRLYLGIMHKNHRKLFQSMGNAKGDNANRYQKMIYKQIADASKDVPRLLLTSKKAMEKFKPSQEILRIKKEKTFKRESKNFSLRDLHALIEYYRNCIPQYSNWSFYDFQFQDTGKYQNIKEFTDDVQKYGYKISFRDIDDEYINQALNEGKMYLFEVVNKDIYNTKNGSKNLHTLYFEHILSAENLNDPVFKLSGMAEIFQRQPSVNEREKITTQKNQCILDKGDRAYKYRRYTEKKIMFHMSLVLNTGKGEIKQVQFNKIINQRISSSDNEMRVNVIGIDRGEKNLLYYSVVKQNGEIIEQASLNEINGVNYRDKLIEREKERLKNRQSWKPVVKIKDLKKGYISHVIHKICQLIEKYSAIVVLEDLNMRFKQIRGGIERSVYQQFEKALIDKLGYLVFKDNRDLRAPGGVLNGYQLSAPFVSFEKMRKQTGILFYTQAEYTSKTDPITGFRKNVYISNSASLDKIKEAVKKFDAIGWDGKEQSYFFKYNPYNLADEKYKNSTVSKEWAIFASAPRIRRQKGEDGYWKYDRVKVNEEFEKLLKVWNFVNPKATDIKQEIIKKIKAGDLQGEKELDGRLRNFWHSFIYLFNLVLELRNSFSLQIKIKAGEVIAVDEGVDFIASPVKPFFTTPNPYIPSNLCWLAVENADANGAYNIARKGVMILKKIREHAKKDPEFKKLPNLFISNAEWDEAARDWGKYAGTTALNLDH

SEQ ID NO: 13 - protein, 1260 aa, Porphyromonas crevioricanis
MDSLKDFTNLYPVSKTLRFELKPVGKTLENIEKAGILKEDEHRAESYRRVKKIIDTYHKVFIDSSLENMAKMGIENEIKAMLQSFCELYKKDHRTEGEDKALDKIRAVLRGLIVGAFTGVCGRRENTVQNEKYESLFKEKLIKEILPDFVLSTEAESLPFSVEEATRSLKEFDSFTSYFAGFYENRKNIYSTKPQSTAIAYRLIHENLPKFIDNILVFQKIKEPIAKELEHIRADFSAGGYIKKDERLEDIFSLNYYIHVLSQAGIEKYNALIGKIVTEGDGEMKGLNEHINLYNQQRGREDRLPLFRPLYKQILSDREQLSYLPESFEKDEELLRALKEFYDHIAEDILGRTQQLMTSISEYDLSRIYVRNDSQLTDISKKMLGDWNAIYMARERAYDHEQAPKRITAKYERDRIKALKGEESISLANLNSCIAFLDNVRDCRVDTYLSTLGQKEGPHGLSNLVENVFASYHEAEQLLSFPYPEENNLIQDKDNVVLIKNLLDNISDLQRFLKPLWGMGDEPDKDERFYGEYNYIRGALDQVIPLYNKVRNYLTRKPYSTRKVKLNFGNSQLLSGWDRNKEKDNSCVILRKGQNFYLAIMNNRHKRSFENKMLPEYKEGEPYFEKMDYKFLPDPNKMLPKVFLSKKGIEIYKPSPKLLEQYGHGTHKKGDTFSMDDLHELIDFFKHSIEAHEDWKQFGFKFSDTATYENVSSFYREVEDQGYKLSFRKVSESYVYSLIDQGKLYLFQIYNKDFSPCSKGTPNLHTLYWRMLFDERNLADVIYKLDGKAEIFFREKSLKNDHPTHPAGKPIKKKSRQKKGEESLFEYDLVKDRRYTMDKFQFHVPITMNFKCSAGSKVNDMVNAHIREAKDMHVIGIDRGERNLLYICVIDSRGTILDQISLNTINDIDYHDLLESRDKDRQQEHRNWQTIEGIKELKQGYLSQAVHRIAELMVAYKAVVALEDLNMGFKRGRQKVESSVYQQFEKQLIDKLNYLVDKKKRPEDIGGLLRAYQFTAPFKSFKEMGKQNGFLFYIPAWNTSNIDPTTGFVNLFHVQYENVDKAKSFFQKFDSISYNPKKDWFEFAFDYKNFTKKAEGSRSMWILCTHGSRIKNFRNSQKNGQWDSEEFALTEAFKSLFVRYEIDYTADLKTAIVDEKQKDFFVDLLKLFKLTVQMRNSWKEKDLDYLISPVAGADGRFFDTREGNKSLPKDADANGAYNIALKGLWALRQIRQTSEGGKLKLAISNKEWLQFVQERSYEKD

SEQ ID NO: 14 - protein, 1324 aa, Prevotella disiens
MENYQEFTNLFQLNKTLRFELKPIGKTCELLEEGKIFASGSFLEKDKVRADNVSYVKKEIDKKHKIFIEETLSSFSISNDLLKQYFDCYNELKAFKKDCKSDEEEVKKTALRNKCTSIQRAMREAISQAFLKSPQKKLLAIKNLIENVFKADENVQHFSEFTSYFSGFETNRENFYSDEEKSTSIAYRLVHDNLPIFIKNIYIFEKLKEQFDAKTLSEIFENYKLYVAGSSLDEVFSLEYFNNTLTQKGIDNYNAVIGKIVKEDKQEIQGLNEHINLYNQKHKDRRLPFFISLKKQILSDREALSWLPDMFKNDSEVIDALKGFYIEDGFENNVLTPLATLLSSLDKYNLNGIFIRNNEALSSLSQNVYRNFSIDEAIDAQNAELQTFNNYELIANALRAKIKKETKQGRKSFEKYEEYIDKKVKAIDSLSIQEINELVENYVSEFNSNSGNMPRKVEDYFSLMRKGDFGSNDLIENIKTKLSAAEKLLGTKYQETAKDIFKKDENSKLIKELLDATKQFQHFIKPLLGTGEEADRDLVFYGDFLPLYEKFEELTLLYNKVRNRLTQKPYSKDKIRLCFNKPKLMTGWVDSKTEKSDNGTQYGGYLFRKKNEIGEYDYFLGISSKAQLFRKNEAVIGDYERLDYYQPKANTIYGSAYEGENSYKEDKKRLNKVIIAYIEQIKQTNIKKSIIESISKYPNISDDDKVTPSSLLEKIKKVSIDSYNGILSFKSFQSVNKEVIDNLLKTISPLKNKAEFLDLINKDYQIFTEVQAVIDEICKQKTFIYFPISNVELEKEMGDKDKPLCLFQISNKDLSFAKTFSANLRKKRGAENLHTMLFKALMEGNQDNLDLGSGAIFYRAKSLDGNKPTHPANEAIKCRNVANKDKVSLFTYDIYKNRRYMENKFLFHLSIVQNYKAANDSAQLNSSATEYIRKADDLHIIGIDRGERNLLYYSVIDMKGNIVEQDSLNIIRNNDLETDYHDLLDKREKERKANRQNWEAVEGIKDLKKGYLSQAVHQIAQLMLKYNAIIALEDLGQMFVTRGQKIEKAVYQQFEKSLVDKLSYLVDKKRPYNELGGILKAYQLASSITKNNSDKQNGFLFYVPAWNTSKIDPVTGFTDLLRPKAMTIKEAQDFFGAFDNISYNDKGYFEFETNYDKFKIRMKSAQTRWTICTFGNRIKRKKDKNYWNYEEVELTEEFKKLFKDSNIDYENCNLKEEIQNKDNRKFFDDLIKLLQLTLQMRNSDDKGNDYIISPVANAEGQFFDSRNGDKKLPLDADANGAYNIARKGLWNIRQIKQTKNKDDLNLSISSTEWLDFVREKPYLK

SEQ ID NO: 15 - protein, 1484 aa, Peregrinibacteria bacterium
  misc_feature (1073)..(1073): Xaa can be any naturally occurring amino acid
MSNFFKNFTNLYELSKTLRFELKPVGDTLTNMKDHLEYDEKLQTFLKDQNIDDAYQALKPQFDEIHEEFITDSLESKKAKEIDFSEYLDLFQEKKELNDSEKKLRNKIGETFNKAGEKWKKEKYPQYEWKKGSKIANGADILSCQDMLQFIKYKNPEDEKIKNYIDDTLKGFFTYFGGFNQNRANYYETKKEASTAVATRIVHENLPKFCDNVIQFKHIIKRKKDGTVEKTERKTEYLNAYQYLKNNNKITQIKDAETEKMIESTPIAEKIFDVYYFSSCLSQKQIEEYNRIIGHYNLLINLYNQAKRSEGKHLSANEKKYKDLPKFKTLYKQIGCGKKKDLFYTIKCDTEEEANKSRNEGKESHSVEEIINKAQEAINKYFKSNNDCENINTVPDFINYILTKENYEGVYWSKAAMNTISDKYFANYHDLQDRLKEAKVFQKADKKSEDDIKIPEAIELSGLFGVLDSLADWQTTLFKSSILSNEKLKIITDSQTPSEALLKMIFNDIEKNMESFLKETNDIITLKKYKGNKEGTEKIKQWFDYTLAINRMLKYFLVKENKIKGNSLDTNISEALKTLIYSDDAEWFKWYDALRNYLTQKPQDEAKENKLKLNFDNPSLAGGWDVNKECSNFCVILKDKNEKKYLAMIKKGENTLFQKEWTEGRGKNLTKKSNPLFEINNCEILSKMEYDFWADVSKMIPKCSTQLKAVVNHFKQSDNEFIFPIGYKVTSGEKFREECKISKQDFELNNKVFNKNELSVTAMRYDLSSTQEKQYIKAFQKEYWELLFKQEKRDTKLTNNEIFNEWINFCNKKYSELLSWERKYKDALTNWINFCKYFLSKYPKTTLFNYSFKESENYNSLDEFYRDVDICSYKLNINTTINKSILDRLVEEGKLYLFEIKNQDSNDGKSIGHKNNLHTIYWNAIFENFDNRPKLNGEAEIFYRKAISKDKLGIVKGKKTKNGTWIIKNYRFSKEKFILHVPITLNFCSNNEYVNDIVNTKFYNFSNLHFLGIDRGEKHLAYYSLVNKNGEIVDQGTLNLPFTDKDGNQRSIKKEKYFYNKQEDKWEAKEVDXWNYNDLLDAMASNRDMARKNWQRIGTIKEAKNGYVSLVIRKIADLAVNNERPAFIVLEDLNTGFKRSRQKIDKSVYQKFELALAKKLNFLVDKNAKRDEIGSPTKALQLTPPVNNYGDIENKKQAGIMLYTRANYTSQTDPATGWRKTIYLKAGPEETTYKKDGKIKNKSVKDQIIETFTDIGFDGKDYYFEYDKGEFVDEKTGEIKPKKWRLYSGENGKSLDRFRGEREKDKYEWKIDKIDIVKILDDLFVNFDKNISLLKQLKEGVELTRNNEHGTGESLRFAINLIQQIRNTGNNERDNDFILSPVRDENGKHFDSREYWDKETKGEKISMPSSGDANGAFNIARKGIIMNAHILANSDSKDLSLFVSDEEWDLHLNNKTEWKKQLNIFSSRKAMAKRKKKRPAATKK

SEQ ID NO: 16 - protein, 1245 aa, Porphyromonas macacae
MKTQHFFEDFTSLYSLSKTIRFELKPIGKTLENIKKNGLIRRDEQRLDDYEKLKKVIDEYHEDFIANILSSFSFSEEILQSYIQNLSISEARAKIEKTMRDTLAKAFSEDERYKSIFKKELVKKDIPVWCPAYKSLCKKFDNFTTSLVPFHENRKNLYTSNEITASIPYRIVHVNLPKFIQNIEALCELQKKMGADLYLEMMENLRNVWPSFVKTPDDLCNLKTYNHLMVQSSISEYNRFVGGYSTEDGTKHQGINEWINIYRQRNKEMRLPGLVFLHKQILAKVDSSSFISDTLENDDQVFCVLRQFRKLFWNTVSSKEDDAASLKDLFCGLSGYDPEAIYVSDAHLATISKNIFDRWNYISDAIRRKTEVLMPRKKESVERYAEKISKQIKKRQSYSLAELDDLLAHYSEESLPAGFSLLSYFTSLGGQKYLVSDGEVILYEEGSNIWDEVLIAFRDLQVILDKDFTEKKLGKDEEAVSVIKKALDSALRLRKFFDLLSGTGAEIRRDSSFYALYTDRMDKLKGLLKMYDKVRNYLTKKPYSIEKFKLHFDNPSLLSGWDKNKELNNLSVIFRQNGYYYLGIMTPKGKNLFKTLPKLGAEEMFYEKMEYKQIAEPMLMLPKVFFPKKTKPAFAPDQSVVDIYNKKTFKTGQKGFNKKDLYRLIDFYKEALTVHEWKLFNFSFSPTEQYRNIGEFFDEVREQAYKVSMVNVPASYIDEAVENGKLYLFQIYNKDFSPYSKGIPNLHTLYWKALFSEQNQSRVYKLCGGGELFYRKASLHMQDTTVHPKGISIHKKNLNKKGETSLFNYDLVKDKRFTEDKFFFHVPISINYKNKKITNVNQMVRDYIAQNDDLQHGIDRGERNLLYISRIDTRGNLLEQFSLNVIESDKGDLRTDYQKILGDREQERLRRRQEWKSIESIKDLKDGYMSQVVHKICNMVVEHKAIVVLENLNLSFMKGRKKVEKSVYEKFERMLVDKLNYLVVDKKNLSNEPGGLYAAYQLTNPLFSFEELHRYPQSGILFFVDPWNTSLTDPSTGFVNLLGRINYTNVGDARKFFDRFNAIRYDGKGNILFDLDLSRFDVRVETQRKLWTLTTFGSRIAKSKKSGKWMVERIENLSLCFLELFEQFNIGYRVEKDLKKAILSQDRKEFYVRLIYLFNLMMQIRNSDGEEDYILSPALNEKNLQFDSRLIEAKDLPVDADANGAYNVARKGLMVVQRIKRGDHESIHRIGRAQWLRYVQEGIVE

SEQ ID NO: 17 - protein, 1250 aa, Smithella sp.
MQTLFENFTNQYPVSKTLRFELIPQGKTKDFIEQKGLLKKDEDRAEKYKKVKNIIDEYHKDFIEKSLNGLKLDGLEKYKTLYLKQEKDDKDKKAFDKEKENLRKQIANAFRNNEKFKTLFAKELIKNDLMSFACEEDKKNVKEFEAFTTYFTGFHQNRANMYVADEKRTAIASRLIHENLPKFIDNIKIFEKMKKEAPELLSPFNQTLKDMKDVIKGTTLEEIFSLDYFNKTLTQSGIDIYNSVIGGRTPEEGKTKIKGLNEYINTDFNQKQTDKKKRQPKFKQLYKQILSDRQSLSFIAEAFKNDTEILEAIEKFYVNELLHFSNEGKSTNVLDAIKNAVSNLESFNLTKMYFRSGASLTDVSRKVFGEWSIINRALDNYYATTYPIKPREKSEKYEERKEKWLKQDFNVSLIQTAIDEYDNETVKGKNSGKVIADYFAKFCDDKETDLIQKVNEGYIAVKDLLNTPCPENEKLGSNKDQVKQIKAFMDSIMDIMHFVRPLSLKDTDKEKDETFYSLFTPLYDHLTQTIALYNKVRNYLTQKPYSTEKIKLNFENSTLLGGWDLNKETDNTAIILRKDNLYYLGIMDKRHNRIFRNVPKADKKDFCYEKMVYKLLPGANKMLPKVFFSQSRIQEFTPSAKLLENYANETHKKGDNFNLNHCHKLIDFFKDSINKHEDWKNFDFRFSATSTYADLSGFYHEVEHQGYKISFQSVADSFIDDLVNEGKLYLFQIYNKDFSPFSKGKPNLHTLYWKMLFDENNLKDVVYKLNGEAEVFYRKKSIAEKNTTIHKANESIINKNPDNPKATSTFNYDIVKDKRYTIDKFQFHIPITMNFKAEGIFNMNQRVNQFLKANPDINIIGIDRGERHLLYYALINQKGKILKQDTLNVIANEKQKVDYHNLLDKKEGDRATARQEWGVIETIKELKEGYLSQVIHKLTDLMIENNAIIVMEDLNFGFKRGRQKVEKQVYQKFEKMLIDKLNYLVDKNKKANELGGLLNAFQLANKFESFQKMGKQNGFIFYVPAWNTSKTDPATGFIDFLKPRYENLNQAKDFFEKFDSIRLNSKADYFEFAFDFKNFTEKADGGRTKWTVCTTNEDRYQWNRALNNNRGSQEKYDITAELKSLFDGKVDYKSGKDLKQQIASQESADFFKALMKNLSITLSLRHNNGEKGDNEQDYILSPVADSKGRFFDSRKADDDMPKNADANGAYHIALKGLWCLEQISKTDDLKKVKLAISNKEWLEFVQTLKG

SEQ ID NO: 18 - DNA, 3987 bp, Artificial
  enasCPf1
atggccgggagcaagaagcgccggataaagcaggacacgcagttcgagggcttcaccaacctgtaccaagtctccaagacgctccggttcgagcttatcccgcaagggaagaccctgaaacacatccaggaacaaggtttcatcgaggaggacaaggcccgcaacgaccactacaaggagctcaagcccataatcgatcggatctacaagacgtacgccgaccagtgcctccaactggtgcagctcgactgggagaacctgagcgccgccattgacagctaccgcaaggaaaagacggaggagacgcgcaacgcccttattgaggagcaagccacctaccgcaacgccatccacgactacttcatcgggcgcaccgacaacctgacggacgcgatcaacaagcgccacgcggaaatctacaagggccttttcaaggccgagctcttcaacgggaaggtcctaaaacagctcgggactgtcacgacaaccgagcatgagaacgccctccttcgcagcttcgacaagttcaccacatacttctcgggcttctaccggaaccgcaagaacgttttcagcgccgaggacatctccaccgccatcccgcacaggatcgtccaggacaacttccccaagttcaaggagaactgccacatcttcacgcgcctgattacagccgtaccttcacttcgtgagcacttcgagaacgtcaaaaaggccatcgggatcttcgtctccacgtccatcgaggaggtattctctttcccgttctataaccagctcctgacccagacgcagatcgacctctacaaccagctactgggcggcatcagccgggaggccgggaccgagaaaataaagggcctcaacgaagttctcaacctggccatccagaagaacgacgagaccgcgcatatcatcgcatccctgccgcatcgcttcattcctttgttcaagcagatattgagcgaccggaacaccctctcgttcatcctcgaagaattcaagagcgacgaggaggtcattcagtctttctgcaagtacaagacgctcctacggaatgagaatgtgctggagaccgcggaggcactcttcaatgagctgaactccattgacctgacccacatcttcattagccacaagaaactggagacgatctccagcgccctgtgcgaccactgggacactctccgcaacgccctctacgaacgccggatctccgaacttaccggcaagataactaagtcggctaaggagaaggtgcaacggagcctcaagcacgaggacatcaaccttcaggaaatcatctcagccgcgggcaaggagctgagcgaggcgtttaagcagaaaacatcggagatactgagccacgcgcacgcggccctggatcaaccgctgccgacgactctcaagaagcaagaggagaaggaaatccttaagtcccagctcgactcgctgctcggcctctatcacttgctcgactggttcgcggttgatgagtccaacgaggtggacccggagttctccgcgcgcctcacgggtattaagctggagatggagccaagcttaagcttctacaacaaggcccgcaactacgcgaccaaaaaaccgtactcagtcgagaaattcaagctgaatttccagatgcctacattggcgagggggtgggacgtgaaccgcgagaagaacaatggagccatcctgttcgtcaaaaatgggttgtactacctgggcatcatgcccaagcagaagggccgttacaaggccctgtcattcgagcctaccgagaagacctcggagggcttcgacaagatgtactacgactatttcccggacgccgccaagatgatcccgaagtgctccacgcagctcaaagccgtcacggcccacttccagacgcataccacgccgatacttctgagcaacaacttcattgagccgctagagatcacgaaggagatatacgacctaaacaaccccgaaaaggagcccaagaagttccagacagcctacgctaagaagacaggtgatcagaagggatatagggaggcactctgcaagtggatcgacttcacgcgcgacttcctgtcgaaatatacaaagacgaccagcattgacctaagttctctccgcccatcctcccagtacaaggatctgggcgagtattatgcggagctgaacccattgctgtaccacatcagcttccagaggatcgccgagaaggagattatggacgcggtggagacggggaaactatacctgttccaaatatataacaaggacttcgctaaagggcaccacgggaagcccaacctgcacacactctactggacgggcttgttttcgccagaaaatttggccaagacttcgatcaagctcaacggccaggcggagttgttttaccgtcccaagtctcgcatgaagcgcatggcgcatcgcctcggagagaaaatgcttaacaagaagctcaaggatcagaagacgcccatacctgatacgttgtaccaggaattgtacgactacgtgaaccaccgcctatcgcacgacctctcagacgaggcccgcgccctcctcccaaacgtgattactaaggaggtttcccatgaaataatcaaggaccgacggttcaccagcgacaaattttttttccacgtgcctatcacgctcaattaccaggcggccaactccccatcgaagttcaaccagcgcgtgaacgcctaccttaaggagcacccggagaccccaatcatcgggatcgaccgtggcgagcggaacctgatctatattacggtgatcgatagcaccgggaagatcctggagcagcgctccctgaacacaatccagcagtttgactaccagaagaaactcgacaaccgggagaaggagcgcgtcgcagcccggcaagcatggagtgtggtcggcaccataaaggacctgaaacagggttacctaagtcaagttatccacgagatcgttgacctgatgatacactatcaagccgtagtcgtgctggagaacctcaacttcgggtttaagtccaagcgcaccggcatcgcggagaaggcggtgtaccagcagttcgagaagatgctgatcgacaagctgaactgcctggtgctcaaggactaccctgcggagaaggtcggcggggtcttgaacccgtaccagctaaccgaccagttcacgagcttcgccaaaatgggcacgcagtccggattcttgttttatgtcccggctccatatacaagtaagatcgacccgctgacagggtttgttgacccattcgtgtggaagaccatcaagaaccacgagagcaggaaacacttcttagagggcttcgacttcctgcattacgacgttaagacaggcgacttcatcctgcacttcaagatgaaccgcaacctgtcgttccagaggggcctgcccggcttcatgcccgcctgggatatcgtctttgagaagaatgagacgcagttcgacgcgaaggggacgccgttcatcgctggaaagcggatcgtgccggtcatcgagaaccaccgcttcacgggtcgctaccgagatttataccccgccaacgaactaattgcgctgctggaggagaaggggatcgtgttccgagatggcagcaacattctcccgaagctgctggagaacgacgactcgcacgctattgacacgatggtcgccctcatacggagcgtgcttcagatgcggaacagtaacgctgccacgggcgaggactacattaactcccccgtccgcgacctcaacggggtctgcttcgatagccgcttccagaacccggagtggcctatggatgcggacgcgaacggggcctaccacatcgccctcaagggccaactcctgctcaaccacttgaaggaaagcaaagacctcaaattgcagaatggcatcagtaaccaggactggctcgcgtacatccaggaactgagaaacgggtccaagaagcggcgtatcaagcaagattga

SEQ ID NO: 19 - DNA, 3987 bp, Artificial
  enasCPf1
atggcgggaagcaaaaagcgccggattaagcaagacacgcagttcgagggcttcacgaacctctaccaagtcagcaagaccctccggttcgagctgataccacagggaaagacgctcaagcacatccaggaacagggcttcatcgaggaggacaaggcgcgcaacgaccactacaaggagttgaaaccgatcatcgaccgcatctacaagacgtacgccgaccagtgcctccagctcgtgcagctcgactgggagaacctctccgccgccattgactcgtaccggaaggagaagactgaggagacccgcaacgccctgatcgaggagcaagcaacctaccggaacgccatccacgactacttcatcggccgcaccgacaacctcaccgacgcgatcaacaagcggcacgcggagatatacaaagggctgttcaaggcggagctgttcaacggcaaggtgctcaagcagctagggacggtgaccacgaccgagcacgagaacgcgctcctccgcagcttcgacaagttcaccacctacttcagcggcttctaccggaaccgcaagaatgtgttcagcgcggaggacatcagcacggccatcccgcaccgcatcgtccaggacaacttcccgaagttcaaggagaactgccacatcttcacccgcctgataaccgccgtcccctccctgcgggagcacttcgagaacgtcaaaaaggcaattgggatcttcgtctcgaccagcattgaggaggtgttcagcttccccttctacaaccagctcctcacccagacgcagatcgacctgtacaatcagttgctcggcgggataagccgcgaggcgggaaccgaaaaaatcaaggggctgaacgaagtgttgaacctcgccatccagaagaacgacgagaccgcgcacatcatcgcctccctgccccaccggttcatcccgctgttcaagcagatcctctctgaccggaacaccctgtccttcattcttgaggagttcaagtcggacgaggaggtcatccagagcttctgcaagtacaagacgctgctacggaacgagaacgtgctggagacggcggaggcactgttcaacgagctaaacagcatcgacctcacgcacatcttcatcagtcacaagaaactggagaccatctcctccgcgctgtgcgaccactgggacacgctcaggaacgcgctctacgagcgccgaatcagtgagctgacgggcaagatcacgaagtccgcgaaggagaaggtgcagcggtccctcaagcacgaggacatcaacctccaggagatcatctcagcggctgggaaagagctgtccgaggcgttcaagcagaaaacgagcgaaatcctgtcccacgcgcacgcggccctggatcagcctctgccgacgaccctcaagaaacaagaagaaaaggaaatcctcaagtcgcagctcgactcgctgctgggcctgtaccatctcctcgactggttcgccgtggacgagagcaacgaggtggaccccgagttctccgcgcggcttacggggatcaagctggagatggagcccagcctgtccttctacaacaaggcgcgcaactacgccaccaagaagccctacagcgtggagaagttcaagctcaacttccagatgcccactctcgcacgtgggtgggacgtcaaccgcgaaaaaaataatggggcgatcctgttcgtcaagaacggcctgtactacttgggcatcatgccgaaacagaagggccgctacaaggccctgagcttcgaaccgaccgagaaaacgagcgaggggttcgacaagatgtactacgactacttccccgacgccgcgaagatgattccaaagtgctccacgcagcttaaggccgtgacggcccacttccagacgcacacgaccccgatcctcctcagcaacaacttcatcgagcccctggagatcacgaaggagatatacgacctgaacaacccggagaaggagcccaagaaattccagaccgcctacgccaagaagacaggcgaccaaaagggttacagggaggccctctgcaagtggatcgacttcactagggacttcctgtccaagtacaccaagactacctctatcgacctgtccagcctccgcccgtcgtcccagtacaaagatttgggcgagtattacgcggagctgaacccactgctctaccacatcagcttccagcgcatcgcggagaaggagatcatggacgcagtggagacgggcaagctatacctatttcagatatacaacaaagacttcgctaagggacaccacggcaagcctaacctgcacaccctctactggacggggctcttcagcccggagaacctcgccaagacctcgatcaagctcaacggccaggccgagctgttctaccggcccaagtcccgcatgaagcggatggcccaccggctcggggagaaaatgctcaacaagaaattgaaggaccaaaaaacgccgatacccgacaccctataccaggagctgtacgactatgtgaaccaccgcctgagccacgacctcagcgacgaggcgcgggccctcctgccgaacgtcatcacaaaggaggtcagccacgagatcatcaaggaccggcgcttcacctccgacaagtttttctttcacgtgcccatcacgctcaactaccaggccgccaactcgccgtccaagttcaaccagcgcgtgaacgcctacctcaaggagcaccccgagaccccgatcatcgggattgaccgaggggagcggaacctcatctacatcaccgtcatcgacagcaccgggaagatccttgaacagcggtcgctcaacaccatccagcagttcgactaccagaagaaactcgacaaccgggagaaggagagagtggcggcccgccaggcttggtccgtcgtcgggacgattaaggacttgaaacaaggttacctgtcgcaagtgatccacgagatcgttgacctgatgatccactaccaagccgtcgtggtcctggagaacctcaacttcggcttcaagagcaaacgaaccggcatcgcggagaaggccgtgtaccagcagttcgaaaaaatgctgatcgacaagctgaactgcctcgtgctcaaggactaccccgctgagaaggtcggcggggtgctgaacccgtaccagctcactgaccagttcaccagcttcgcaaagatgggcacccagtccggcttcctgttctacgtgcctgcgccatacacctcgaagatcgacccgctcaccgggttcgtggaccccttcgtctggaagaccatcaagaaccacgagagccgcaagcacttcctggagggcttcgacttcctccactacgacgtcaagaccggggacttcatcctgcacttcaagatgaaccgcaacctcagtttccagcgcggcctgccggggttcatgcccgcttgggatatagtcttcgagaagaatgagacgcagttcgacgcgaagggcaccccgttcatcgccgggaagcgcatcgtgccggtcatcgagaaccaccggttcaccgggcgctaccgcgacctatacccggcgaacgagttgatcgccctcctggaggagaagggcatcgtgttccgcgacggctccaacatcctcccgaagctgctcgaaaacgacgactcccacgccatcgacacgatggtcgcgctgatccggtcggtgctccagatgcggaactccaacgccgcgacgggcgaggactacatcaacagtccggtccgcgatctgaacggcgtctgcttcgactcccggttccagaaccccgagtggccgatggacgcggacgcgaacggcgcataccacatcgccctaaaagggcaattgctgctcaaccacctcaaggaatccaaagacctaaagctccagaacggcatctccaaccaggactggctggcgtacatccaggaactgcggaacgggagcaaaaaacgtcggatcaagcaagattga

SEQ ID NO: 20 - DNA, 3987 bp, Artificial
  enasCPf1
atggcgggctccaagaaacgccggattaagcaagatacccagttcgaggggttcacgaacctctaccaagtgagcaagaccctccgattcgaactgattcctcaggggaagaccctcaagcacatccaggagcaagggttcatcgaggaggacaaggcgcggaacgaccactacaaggaactcaaacccatcatcgaccgcatctacaagacctacgccgatcagtgcctccagctcgtgcagttggactgggagaacctcagcgcggccattgactcctaccggaaggagaaaacggaggagacgcgcaacgcgctcatcgaggaacaggcaacctatcgcaacgccatccacgactacttcatcgggaggactgacaacctcactgacgcgattaacaagcgccacgcggagatatacaagggactcttcaaagcggagctgtttaacggcaaggttctcaagcaactcggcactgtgaccacgaccgagcatgagaacgccctgctccgctccttcgacaagttcaccacctacttctccgggttctaccgcaaccgcaagaatgtcttcagcgcggaggacatcagcacggccattccacatcgaatcgtccaagataacttcccgaagttcaaggagaactgccacatcttcacccgactcattactgctgtaccgtcgttacgcgaacacttcgagaacgtcaagaaggcaattggaatcttcgtctctacgtcaatagaggaggtgttcagcttccctttctacaaccagctccttacgcagacccagatagacctgtacaatcagctcctcggtgggatcagccgggaggcggggactgagaagattaaagggctcaacgaggtcttgaacctggccatccaaaaaaacgatgagacggcgcacatcatcgcctcgctgccccaccggttcatcccgctgttcaagcagatcctcagtgacaggaacaccttgagctttatcctagaggagttcaagagcgacgaggaggtgatccagagcttctgcaagtacaaaaccctgctgaggaacgagaacgtcctggagacggcggaggcgctgttcaacgagctgaactctatcgacttaactcacatattcatctcgcacaagaagctggagactattagctctgcactctgcgaccactgggacaccctccgcaacgcgctctacgagcgccgcatctcggagctgaccgggaagatcaccaaatccgcgaaggaaaaggtccagcgttccctcaaacacgaggatattaacttacaggagattatctcagcggctgggaaggagttgtcagaggcgttcaagcagaaaacttccgagatcctgagccacgcgcacgcagcgctcgaccagcctctgcccaccaccctcaaaaagcaggaagaaaaagagatcctcaagagccagttggactccctgctggggctctatcaccttctcgactggttcgccgtcgatgagtcgaacgaggtggaccccgagttctccgcccggctgaccggcatcaagctagagatggagccgtccctcagcttctacaataaggcccgcaactacgcgaccaaaaaaccctacagcgtggagaagttcaagctgaacttccagatgccgaccttagcacgcggttgggacgtaaacagggagaagaacaatggagccatcctgttcgtcaagaacgggctttactacctcgggataatgcccaagcagaagggccgctacaaggccctttccttcgagccgacggagaaaacctccgaggggttcgacaagatgtactacgactacttccccgacgccgccaagatgatcccgaagtgctcaacgcagctaaaagccgtgaccgcccacttccagacccacacgacgccgatcctgctgagcaacaacttcatcgagccccttgagatcactaaggagatatacgacctgaacaaccccgagaaggagcccaagaagtttcaaaccgcctacgccaaaaaaactggcgaccaaaagggctacagggaggcgctgtgtaagtggatcgacttcacacgcgacttcctttcgaagtatacgaagacaacctctattgacctgagcagcctgcgtcctagctcccagtacaaagatttgggcgagtactacgcggagcttaatccactactctaccacatctcattccagcgcatcgctgagaaggaaatcatggacgcggtggagacaggcaaactgtacctcttccagatatacaacaaagacttcgctaaggggcaccacgggaagcccaaccttcatacgctctactggacgggcctattcagccccgaaaatctggccaagacctccatcaagctgaacggccaagcggagctgttctacagacccaagagccggatgaagcggatggcccacaggctcggcgagaaaatgcttaacaaaaagttgaaggaccagaaaacccctatccccgacaccctctaccaggaactgtacgactacgtgaaccacaggctctcgcacgacctttccgacgaggcccgtgccctactcccgaacgtcattaccaaagaggtttcgcacgagatcatcaaggaccggcggttcacgagcgacaagtttttctttcacgtccccatcacccttaactaccaggcggccaactccccatccaagttcaaccagcgtgtgaatgcctacctcaaggagcacccagagaccccgatcattgggatcgaccggggcgagcggaacctgatctacatcaccgtcatcgactcgacgggcaagattcttgagcagagatcgttgaataccatacagcagttcgactaccagaagaaactcgacaaccgcgagaaggagcgcgtggcggcccgccaggcgtggtccgtcgttgggacgattaaggacttgaaacaaggttatctgtcccaagtcatccacgagatcgttgatctgatgatccactatcaggcagtggtggtgctggagaatctcaacttcggcttcaagagtaagcggacgggaatcgccgagaaggccgtgtaccagcagttcgagaagatgctgatcgacaagctcaactgccttgtgctgaaagactacccggccgagaaggtcggcggcgtcctcaacccgtaccaacttaccgaccagttcacctccttcgccaagatgggcactcagtccgggttcttgttctacgtccccgcaccttacacctctaagatcgaccctctgactggcttcgtagatccattcgtgtggaagaccattaagaaccacgagagccgcaagcacttcctggagggcttcgacttcctgcactacgacgtgaagaccggggacttcatccttcacttcaagatgaaccggaacctcagcttccagcggggcctgccggggttcatgcccgcctgggacatcgtgttcgagaagaacgagacccagttcgacgcgaagggcacgcccttcatcgccgggaagcgtatcgtgccggtgatcgagaaccatcgtttcacgggtcgctaccgtgacctctacccggcgaacgagcttatcgcactcctggaggagaagggcatcgtcttccgggacggctccaacatcctcccgaaactgctggaaaacgacgactctcacgccatcgacacgatggtggccctcatccggtccgtgctccaaatgcggaacagcaacgccgccaccggtgaggactacatcaacagcccggtccgggatctgaacggggtgtgcttcgattcgcggttccagaatcctgagtggccgatggacgcggatgcaaacggggcgtaccacatcgcgctcaagggccagttacttctgaaccaccttaaggagtctaaagatttgaaactccagaacgggatctcgaaccaggactggctggcctacatccaagagttgcggaacggcagcaagaagcggcggattaagcaagattag

SEQ ID NO: 21 - DNA, 1592 bp, Medicago truncatula
actgttaataatttttaaacgtcagcgcactaaaaaaacgaaaagacggacacgtgaaaataaaaaacacacactagtttatgacgcaatactattttacttatgatttgggtacattagacaaaaccgtgaaagagatgtatcagctatgaaacctgtatacttcaatacagagacttactcatatcggatacgtacgcacgaagtatcatattaattattttaatttttaataaatattttatcggatacttatgtgatactctacatatacacaaggatatttctaagatactttatagatacgtatcctagaaaaacatgaagagtaaaaaagtgagacaatgttgtaaaaattcattataaatgtatatgattcaattttagatatgcatcagtataattgattctcgatgaaacacttaaaattatatttcttgtggaagaacgtagcgagagaggtgattcagttagacaacattaaataaaattaatgttaagttcttttaatgatgtttctctcaatatcacatcatatgaaaatgtaatatgatttataagaaaatttttaaaaaatttattttaataatcacatgtactattttttaaaaattgtatcttttataataatacaataataaagagtaatcagtgttaatttttcttcaaatataagttttattataaatcattgttaacgtatcataagtcattaccgtatcgtatcttaatttttttttaaaaaccgctaattcacgtacccgtattgtattgtacccgcacctgtatcacaatcgatcttagttagaagaattgtctcgaggcggtgcaagacagcatataatagacgtggactctcttataccaaacgttgtcgtatcacaaagggttaggtaacaagtcacagtttgtccacgtgtcacgttttaattggaagaggtgccgttggcgtaatataacagccaatcgatttttgctataaaagcaaatcaggtaaactaaacttcttcattcttttcttccccatcgctacaaaaccggttcctttggaaaagagattcattcaaacctagcacccaattccgtttcaaggtataatctactttctattcttcgattattttattattattagctactatcgtttaatcgatcttttcttttgatccgtcaaatttaaattcaattagggttttgttcttttctttcatctgattgaaatccttctgaattgaaccgtttacttgattttactgtttattgtatgatttaatcctttgtttttcaaagacagtctttagattgtgattaggggttcatataaatttttagatttggatttttgtattgtatgattcaaaaaatacgtcctttaattagattagtacatggatattttttacccgatttattgattgtcagggagaatttgatgagcaagtttttttgatgtctgttgtaaattgaattgattataattgctgatctgctgcttccagttttcataacccatattcttttaaccttgttgtacacacaatgaaaaattggtgattgattcatttgtttttctttgttttggattatacagg

SEQ ID NO: 22 - DNA, 2000 bp, Zea mays
gtcgtgcccctctctagagataaagagcattgcatgtctaaagtataaaaaattaccacatatttttttgtcacacttatttgaagtgtagtttatctatctctatacatatatttaaacttcactctacaaataatatagtctataatactaaaataatattagtgttttagaggatcatataaataaactgctagacatggtctaaaggataattgaatattttgacaatctacagttttatctttttagtgtgcatgtgatctctctgttttttttgcaaatagcttgacctatataatacttcatccattttattagtacatccatttaggatttagggttgatggtttctatagactaatttttagtacatccattttattctttttagtctctaaattttttaaaactaaaactctattttagttttttatttaataatttagatataaaatgaaataaaataaattgactacaaataaaacaaataccctttaagaaataaaaaaactaagcaaacatttttcttgtttcgagtagataatgacaggctgttcaacgccgtcgacgagtctaacggacaccaaccagcgaaccagcagcgtcgcgtcgggccaagcgaagcagacggcacggcatctctgtagctgcctctggacccctctcgagagttccgctccaccgttggacttgctccgctgtcggcatccagaaattgcgtggcggagcggcagacgtgaggcggcacggcaggcggcctcttcctcctctcacggcaccggcagctacgggggattcctttcccaccgctccttcgctttcccttcctcgcccgccgtaataaatagacaccccctccacaccctctttccccaacctcgtgttcgttcggagcgcacacacacgcaaccagatctcccccaaatccagccgtcggcacctccgcttcaaggtacgccgctcatcctccccccccccctctctctaccttctctagatcggcgatccggtccatggttagggcccggtagttctacttctgttcatgtttgtgttagagcaaacatgttcatgttcatgtttgtgatgatgtggtctggttgggcggtcgttctagatcggagtaggatactgtttcaagctacctggtggatttattaattttgtatctgtatgtgtgtgccatacatcttcatagttacgagtttaagatgatggatggaaatatcgatctaggataggtatacatgttgatgcgggttttactgatgcatatacagagatgctttttttctcgcttggttgtgatgatatggtctggttgggcggtcgttctagatcggagtagaatactgtttcaaactacctggtggatttattaaaggataaagggtcgttctagatcggagtagaatactgtttcaaactacctggtggatttattaaaggatctgtatgtatgtgcctacatcttcatagttacgagtttaagatgatggatggaaatatcgatctaggataggtatacatgttgatgcgggttttactgatgcatatacagagatgctttttttcgcttggttgtgatgatgtggtctggttgggcggtcgttctagatcggagtagaatactgtttcaaactacctggtggatttattaattttgtatctttatgtgtgtgccatacatcttcatagttacgagtttaagatgatggatggaaatattgatctaggataggtatacatgttgatgtgggttttactgatgcatatacatgatggcatatgcggcatctattcatatgctctaaccttgagtacctatctattataataaacaagtatgttttataattattttgatcttgatatacttggatgatggcatatgcagcagctatatgtggattttttagccctgccttcatacgctatttatttgcttggtactgtttcttttgtccgatgctcaccctgttgtttggtgatacttc

SEQ ID NO: 23 - protein, 228 aa, Rattus norvegicus
SSETGPVAVDPTLRRRIEPHEFEVFFDPRELRKETCLLYEINWGGRHSIWRHTSQNTNKHVEVNFIEKFTTERYFCPNTRCSITWFLSWSPCGECSRAITEFLSRYPHVTLFIYIARLYHHADPRNRQGLRDLISSGVTIQIMTEQESGYCWRNFVNYSPSNEAHWPRYPHLWVRLYVLELYCIILGLPPCLNILRRKQPQLTFFTIALQSCHYQRLPPHILWATGLK

SEQ ID NO: 24 - protein, 199 aa, Homo sapiens
MEASPASGPRHLMDPHIFTSNFNNGIGRHKTYLCYEVERLDNGTSVKMDQHRGFLHNQAKNLLCGFYGRHAELRFLDLVPSLQLDPAQIYRVTWFISWSPCFSWGCAGEVRAFLQENTHVRLRIFAARIYDYDPLYKEALQMLRDAGAQVSIMTYDEFKHCWDTFVDHQGCPFQPWDGLDEHSQALSGRLRAILQNQGN

SEQ ID NO: 25 - DNA, 621 bp, Petromyzon marinus
acagatgcagagtatgtgagaattcacgaaaagctggacatctataccttcaagaagcagttctttaacaataagaagtctgtgagccataggtgctacgtgctgttcgagctgaagagaaggggtgaaagaagggcatgtttttgggggtatgctgtgaacaagccccagtctggaactgagagaggcattcacgccgaaattttcagcatcagaaaggtggaggaatacctgagggataaccctggacagtttacaattaattggtattctagctggtctccatgcgctgactgtgccgagaagatcctggaatggtacaaccaggagctgagaggaaatggccataccctgaagatttgggcctgcaagctgtactatgaaaagaacgcaagaaatcagatcggactgtggaacctgagggataatggtgtggggctgaacgtgatggtgtccgagcactatcagtgctgtagaaagattttcattcagtcctcacataatcagctgaacgagaatagatggctggaaaagactctgaagagggctgagaagagaaggtccgaactgtcaattatgatccaggtgaagatcctgcacaccactaagtcacctgccgtg

SEQ ID NO: 26 - protein, 160 aa, Artificial
  deaminase
FERNYDPRELRKETYLLYEIKWGKSGKLWRHWCQNNRTQHAEVYFLENIFNARRFNPSTHCSITWYLSWSPCAECSQKIVDFLKEHPNVLEIYVARLYYHEDERNRQGLRDLVNSGVTIRIMDLPDYNYCWKTFVSDQGGDEDYWPGHFAPWIKQYSLKL

SEQ ID NO: 27 - protein, 207 aa, Artificial
  deaminase
TDAEYVRIHEKLDIYTFKKQFSNNKKSVSHRCYVLFELKRRGERRACFWGYAVNKPQSGTERGIHAEIFSIRKVEEYLRDNPGQFTINWYSSWSPCADCAEKILEWYNQELRGNGHTLKIWVCKLYYEKNARNQIGLWNLRDNGVGLNVMVSEHYQCCRKIFIQSSHNQLNENRWLEKTLKRAEKRRSELSIMFQVKILHTTKSPAV

SEQ ID NO: 28 - protein, 228 aa, Artificial
  deaminase
SSKTGPVAVDPTLRRRIEPHEFEVFFDPRELRKETCLLYEINWGGRHSIWRHTSQNTNKHVEVNFIEKFTTERYFCPNTRCSITWFLSWSPCGECSRAITEFLSRYPNVTLFIYIARLYHLANPRNRQGLRDLISSGVTIQIMTEQESGYCWHNFVNYSPSNESHWPRYPHLWVRLYVLELYCIILGLPPCLNILRRKQSQLTSFTIALQSCHYQRLPPHILWATGLK

SEQ ID NO: 29 - protein, 162 aa, Artificial
  deaminase
SFERNYDPRELRKETYLLYEIKWGKSGKLWRHWCQNNRTQHAEVYFLENIFNARRFNPSTHCSITWYLSWSPCAECSQKIVDFLKEHPNVNLEIYVARLYYPENERNRQGLRDLVNSGVTIRIMDLPDYNYCWKTFVSDQGGDEDYWPGHFAPWIKQYSLKL

SEQ ID NO: 30 - protein, 166 aa, Escherichia coli
SEVEFSHEYWMRHALTLAKRAWDEREVPVGAVLVHNNRVIGEGWNRPIGRHDPTAHAEIMALRQGGLVMQNYRLIDATLYVTLEPCVMCAGAMIHSRIGRVVFGARDAKTGAAGSLMDVLHHPGMNHRVEITEGILADECAALLSDFFRMRRQEIKAQKKAQSSTD

SEQ ID NO: 31 - protein, 166 aa, Artificial
  deaminase
SEVEFSHEYWMRHALTLAKRARDEREVPVGAVLVLNNRVIGEGWNRAIGLHDPTAHAEIMALRQGGLVMQNYRLIDATLYVTFEPCVMCAGAMIHSRIGRVVFGVRNAKTGAAGSLMDVLHYPGMNHRVEITEGILADECAALLCYFFRMPRQVFNAQKKAQSSTD

SEQ ID NO: 32 - protein, 166 aa, Artificial
  deaminase
SEVEFSHEYWMRHALTLAKRAWDEREVPVGAVLVLNNRVIGEGWNRSIGLHDPTAHAEIMALRQGGLVMQNYRLIDATLYVTFEPCVMCAGAMIHSRIGRVVFGVRNAKTGAAGSLMDVLHYPGMNHRVEITEGILADECAALLCYFFRMRRQVFNAQKKAQSSTD

SEQ ID NO: 33 - protein, 166 aa, Artificial
  deaminase
SEVEFSHEYWMRHALTLAKRALDEREVPVGAVLVLNNRVIGEGWNRAIGLHDPTAHAEIMALRQGGLVMQNYRLIDATLYVTFEPCVMCAGAMIHSRIGRVVFGVRNAKTGAAGSLMDVLHYPGMNHRVEITEGILADECNALLCYFFRMRRQVFNAQKKAQSSTD

SEQ ID NO: 34 - protein, 166 aa, Artificial
  deaminase
SEVEFSHEYWMRHALTLAKRALDEREVPVGAVLVLNNRVIGEGWNRAIGLHDPTAHAEIMALRQGGLVMQNYRLIDATLYVTFEPCVMCAGAMIHSRIGRVVFGVRNAKTGAAGSLMDVLHYPGMNHRVEITEGILADECNALLCYFFRMPRQVFNAQKKAQSSTD

SEQ ID NO: 35 - protein, 83 aa, Bacillus phage AR9
TNLSDIIEKETGKQLVIQESILMLPEEVEEVIGNKPESDILVHTAYDESTDENVMLLTSDAPEYKPWALVIQDSNGENKIKML

SEQ ID NO: 36 - protein, 19 aa, Artificial
  Spacer
NNNNNNNNNNNNNNNNNNN

SEQ ID NO: 37 - protein, 22 aa, Artificial
  Target strand
AAANNNNNNNNNNNNNNNNNNN

SEQ ID NO: 38 - protein, 22 aa, Artificial
  Non-target strand
TTTNNNNNNNNNNNNNNNNNNN

SEQ ID NO: 39 - protein, 24 aa, Artificial
  peptide tag
EELLSKNYHLENEVARLKKGSGSG

SEQ ID NO: 40 - protein, 241 aa, Artificial
  peptide tag
EEELLSKNYHLENEVARLKKGSGSGEELLSKNYHLENEVARLKKGSGSGEELLSKNYHLENEVARLKKGSGSGEELLSKNYHLENEVARLKKGSGSGEELLSKNYHLENEVARLKKGSGSGEELLSKNYHLENEVARLKKGSGSGEELLSKNYHLENEVARLKKGSGSGEELLSKNYHLENEVARLKKGSGSGEELLSKNYHLENEVARLKKGSGSGEELLSKNYHLENEVARLKKGSGSG

SEQ ID NO: 41 - protein, 277 aa, Unknown
  peptide tag
MGPDIVMTQSPSSLSASVGDRVTITCRSSTGAVTTSNYASWVQEKPGKLFKGLIGGTNNRAPGVPSRFSGSLIGDKATLTISSLQPEDFATYFCALWYSNHWVFGQGTKVELKRGGGGSGGGGSGGGGSSGGGSEVKLLESGGGLVQPGGSLKLSCAVSGFSLTDYGVNWVRQAPGRGLEWIGVIWGDGITDYNSALKDRFIISKDNGKNTVYLQMSKVRSDDTALYYCVTGLFDYWGQGTLVTVSSYPYDVPDYAGGGGGSGGGGSGGGGSGGGGS

SEQ ID NO: 42 - DNA, 66 bp, Unknown
  recruiting motif
ttcttgtcgtacttatagatcgctacgttatttcaattttgaaaatctgagtcctgggagtgcgga

SEQ ID NO: 43 - protein, 605 aa, Unknown
  recruiting motif
MSGWESYYKTEGDEEAEEEQEENLEASGDYKYSGRDSLIFLVDASKAMFESQSEDELTPFDMSIQCIQSVYISKIISSDRDLLAWFYGTEKDKNSVNFKIYVLQELDNPGAKRILELDQFKGQQGQKRFQDMMGHGSDYSLSEVLWVCANLFSDVQFKMSHKRIMLFTNEDNPHGNDSAKASRARTKAGDLRDTGIFLDLHLKKPGGFDISLFYRDIISIAEDEDLRVHFEESSKLEDLLRKVRAKETRKRALSRLKLKLNKDIVISVGIYNLVQKALKPPPIKLYRETNEPVKTKTRTFNTSTGGLLLPSDTKRSQIYGSRQIILEKEETEELKRFDDPGLMLMGFKPLVLLKKHHYLRPSLFVYPEESLVIGSSTLFSALLIKCLEKEVAALCRYTPRRNIPPYFVALVPQEEELDDQKIQVTPPGFQLVFLPFADDKRKMPFTEKIMATPEQVGKMKAIVEKLRFTYRSDSFENPVLQQHFRNLEALALDLMEPEQAVDLTLPKVEAMNKRLGSLVDEFKELVYPPDYNPEGKVTKRKHDNEGSGSKRPKVEYSEEELKTHISKGTLGKFTVPLKEACRAYGLKSGLKKQELLEALTKHFQD

SEQ ID NO: 44 - protein, 482 aa, Unknown
  recruiting motif
MVRSGNKAAWLCMDVGFTMSNSIPGIESPFEQAKKVITMFVQRQVFAENKDEIALVLFGTDGTDNPLSGGDQYQNITVHRHLMLPDFDLLEDIESKIQPGSQQADFLDALIVSMDVIQHETIGKKFEKRHIEIFTDLSSRFSKSQLDIIIHSLKKCDISERHSIHWPCRLTIGSNLSIRIAAYKSILQERVKKTTWDAKTLKKEDIQKETVYCLNDDDETEVLKEDIIQGFRYGSDIVPFSKVDEEQMKYKSEGKCFSVLGFCKSSQVQRRFFMGNQVLKVFAARDDEAAAVALSSLIHALDDLDIWAIVRYAYDKRANPQVGVAFPHIKHNYECLVYVQLPFMEDLRQYMFSSLKNSKKYAPTEAQLNAVDALIDSMSLAKKDEKTDTLEDLFPTTKIPNPRFQRLFQCLLHRALHPREPLPPIQQHIWNMLNPPAEVTTKSQIPLSKIKTLFPLIEAKKKDQVTAQEIFQDNHEDGPTAK

SEQ ID NO: 45 - DNA, 10 bp, Unknown
  recruiting motif
aatttttgga

SEQ ID NO: 46 - protein, 83 aa, Unknown
  archaea
GSVIDVSSQRVNVQRPLDALGNSLNSPVIIKLKGDREFRGVLKSFDLHMNLVLNDAEELEDGEVTRRLGTVLIRGDNIVYISP

SEQ ID NO: 47 - DNA, 25 bp, MS2 phage
gcgcacatgaggatcacccatgtgc

SEQ ID NO: 48 - protein, 116 aa, MS2 phage
MASNFTQFVLVDNGGTGDVTVAPSNFANGIAEISSNSRSQAYKVTCSVRQSSAQNRKYTIKVEVPKGAWRSYLNMELTIPIFATNSDCELIVKAMQGLLKDGNPIPSAIAANSGIY

SEQ ID NO: 49 - DNA, 26 bp, PP7 phage
ataaggagtttatatggaaaccctta

SEQ ID NO: 50 - protein, 127 aa, PP7 phage
MSKTIVLSVGEATRTLTEIQSTADRQIFEEKVGPLVGRLRLTASLRQNGAKTAYRVNLKLDQADWDCSTSVCGELPKVRYTQVWSHDVTIVANSTEASRKSLYDLTKSLVATSQVEDLVVNLVPLGR

SEQ ID NO: 51 - DNA, 19 bp, Unknown
  recruiting motif
ctgaatgcctgcgagcatc

SEQ ID NO: 52 - protein, 62 aa, Unknown
  recruiting motif
MKSIRCKNCNKLLFKADSFDHIEIRCPRCKRHIIMLNACEHPTEKHCGKREKITHSDETVRY

SEQ ID NO: 53 - protein, 1367 aa, Artificial
  nCas9
DKKYSIGLAIGTNSVGWAVITDEYKVPSKKFKVLGNTDRHSIKKNLIGALLFDSGETAEATRLKRTARRRYTRRKNRICYLQEIFSNEMAKVDDSFFHRLEESFLVEEDKKHERHPIFGNIVDEVAYHEKYPTIYHLRKKLVDSTDKADLRLIYLALAHMIKFRGHFLIEGDLNPDNSDVDKLFIQLVQTYNQLFEENPINASGVDAKAILSARLSKSRRLENLIAQLPGEKKNGLFGNLIALSLGLTPNFKSNFDLAEDAKLQLSKDTYDDDLDNLLAQIGDQYADLFLAAKNLSDAILLSDILRVNTEITKAPLSASMIKRYDEHHQDLTLLKALVRQQLPEKYKEIFFDQSKNGYAGYIDGGASQEEFYKFIKPILEKMDGTEELLVKLNREDLLRKQRTFDNGSIPHQIHLGELHAILRRQEDFYPFLKDNREKIEKILTFRIPYYVGPLARGNSRFAWMTRKSEETITPWNFEEVVDKGASAQSFIERMTNFDKNLPNEKVLPKHSLLYEYFTVYNELTKVKYVTEGMRKPAFLSGEQKKAIVDLLFKTNRKVTVKQLKEDYFKKIECFDSVEISGVEDRFNASLGTYHDLLKIIKDKDFLDNEENEDILEDIVLTLTLFEDREMIEERLKTYAHLFDDKVMKQLKRRRYTGWGRLSRKLINGIRDKQSGKTILDFLKSDGFANRNFMQLIHDDSLTFKEDIQKAQVSGQGDSLHEHIANLAGSPAIKKGILQTVKVVDELVKVMGRHKPENIVIEMARENQTTQKGQKNSRERMKRIEEGIKELGSQILKEHPVENTQLQNEKLYLYYLQNGRDMYVDQELDINRLSDYDVDHIVPQSFLKDDSIDNKVLTRSDKNRGKSDNVPSEEVVKKMKNYWRQLLNAKLITQRKFDNLTKAERGGLSELDKAGFIKRQLVETRQITKHVAQILDSRMNTKYDENDKLIREVKVITLKSKLVSDFRKDFQFYKVREINNYHHAHDAYLNAVVGTALIKKYPKLESEFVYGDYKVYDVRKMIAKSEQEIGKATAKYFFYSNIMNFFKTEITLANGEIRKRPLIETNGETGEIVWDKGRDFATVRKVLSMPQVNIVKKTEVQTGGFSKESILPKRNSDKLIARKKDWDPKKYGGFDSPTVAYSVLVVAKVEKGKSKKLKSVKELLGITIMERSSFEKNPIDFLEAKGYKEVKKDLIIKLPKYSLFELENGRKRMLASAGELQKGNELALPSKYVNFLYLASHYEKLKGSPEDNEQKQLFVEQHKHYLDEIIEQISEFSKRVILADANLDKVLSAYNKHRDKPIREQAENIIHLFTLTNLGAPAAFKYFDTTIDRKRYTSTKEVLDATLIHQSITGLYETRIDLSQLGGD

SEQ ID NO: 54 - protein, 1367 aa, Artificial
  enCas9
DKKYSIGLAIGTNSVGWAVITDEYKVPSKKFKVLGNTDRHSIKKNLIGALLFDSGETAEATRLKRTARRRYTRRKNRICYLQEIFSNEMAKVDDSFFHRLEESFLVEEDKKHERHPIFGNIVDEVAYHEKYPTIYHLRKKLVDSTDKADLRLIYLALAHMIKFRGHFLIEGDLNPDNSDVDKLFIQLVQTYNQLFEENPINASGVDAKAILSARLSKSRRLENLIAQLPGEKKNGLFGNLIALSLGLTPNFKSNFDLAEDAKLQLSKDTYDDDLDNLLAQIGDQYADLFLAAKNLSDAILLSDILRVNTEITKAPLSASMIKRYDEHHQDLTLLKALVRQQLPEKYKEIFFDQSKNGYAGYIDGGASQEEFYKFIKPILEKMDGTEELLVKLNREDLLRKQRTFDNGSIPHQIHLGELHAILRRQEDFYPFLKDNREKIEKILTFRIPYYVGPLARGNSRFAWMTRKSEETITPWNFEEVVDKGASAQSFIERMTNFDKNLPNEKVLPKHSLLYEYFTVYNELTKVKYVTEGMRKPAFLSGEQKKAIVDLLFKTNRKVTVKQLKEDYFKKIECFDSVEISGVEDRFNASLGTYHDLLKIIKDKDFLDNEENEDILEDIVLTLTLFEDREMIEERLKTYAHLFDDKVMKQLKRRRYTGWGRLSRKLINGIRDKQSGKTILDFLKSDGFANRNFMQLIHDDSLTFKEDIQKAQVSGQGDSLHEHIANLAGSPAIKKGILQTVKVVDELVKVMGRHKPENIVIEMARENQTTQKGQKNSRERMKRIEEGIKELGSQILKEHPVENTQLQNEKLYLYYLQNGRDMYVDQELDINRLSDYDVDHIVPQSFLADDSIDNKVLTRSDKNRGKSDNVPSEEVVKKMKNYWRQLLNAKLITQRKFDNLTKAERGGLSELDKAGFIKRQLVETRQITKHVAQILDSRMNTKYDENDKLIREVKVITLKSKLVSDFRKDFQFYKVREINNYHHAHDAYLNAVVGTALIKKYPALESEFVYGDYKVYDVRKMIAKSEQEIGKATAKYFFYSNIMNFFKTEITLANGEIRKAPLIETNGETGEIVWDKGRDFATVRKVLSMPQVNIVKKTEVQTGGFSKESILPKRNSDKLIARKKDWDPKKYGGFDSPTVAYSVLVVAKVEKGKSKKLKSVKELLGITIMERSSFEKNPIDFLEAKGYKEVKKDLIIKLPKYSLFELENGRKRMLASAGELQKGNELALPSKYVNFLYLASHYEKLKGSPEDNEQKQLFVEQHKHYLDEIIEQISEFSKRVILADANLDKVLSAYNKHRDKPIREQAENIIHLFTLTNLGAPAAFKYFDTTIDRKRYTSTKEVLDATLIHQSITGLYETRIDLSQLGGD

SEQ ID NO: 55 - DNA, 4101 bp, Unknown
  Cas9
gacaagaagtacagcatcgggctggcgatcgggaccaactccgtcggctgggctgtgattaccgacgagtacaaggtgccatccaagaagttcaaggtcctcggcaacactgaccggcacagcattaagaagaacctgattggggcgctgctgttcgattcgggggagactgcggaggcgaccaggctgaagcggactgcgcgccggaggtacaccaggaggaagaatcggatctgctacctccaggagattttctcgaatgagatggccaaggtggacgattccttcttccatcgcctggaggagtcgttcctcgttgaggaggacaagaagcatgagaggcatcccattttcgggaatatcgttgacgaggtggcttaccatgagaagtacccgaccatctaccatctgcggaagaagctcgtcgattcgaccgataaggccgacctgcggctgatctacctggccctcgcgcacatgattaagttccggggccatttcctcatcgagggcgacctcaacccggacaactcggacgtggataagctcttcattcagctcgtgcagacatacaaccagctcttcgaggagaatcccattaacgcctcgggggtcgacgctaaggctattctctcggctcggctgtcgaagtcgcgccggctggagaatctcattgcccagctcccaggcgagaagaagaacggcctcttcggcaacctgattgccctgtcgctggggctcacaccgaatttcaagtcgaacttcgacctcgccgaggacgctaagctccagctcagcaaggatacttacgatgatgacctcgataacctgctcgcccagattggggatcagtacgcggatctgttcctcgcggccaagaatctcagcgatgctattctcctgtcggacattctccgcgtcaacacagagattactaaggccccactgtcggcgagcatgattaagaggtacgatgagcatcatcaggacctgacactgctcaaggcgctggtccggcagcagctccccgagaagtacaaggagattttcttcgatcagtcaaagaatgggtacgcgggctacattgatggcggcgcgtcccaggaggagttctacaagttcattaagcccatcctggagaagatggacgggaccgaggagctgctggtgaagctcaatcgggaggacctgctccggaagcagcgcacattcgacaatggctcgattcctcaccagattcacctgggcgagctgcacgccattctccgcaggcaggaggacttctacccgttcctcaaggacaaccgcgagaagatcgagaagatcctgaccttccggattccatactacgtggggccgctcgcgcgggggaactcccggttcgcgtggatgactcgcaagtccgaagaaacgattacaccgtggaatttcgaggaggtcgtcgacaagggcgctagtgcgcagtcattcattgagaggatgaccaatttcgataagaacctgcctaacgagaaggtgctgccgaagcattcgctgctctacgagtacttcaccgtttacaatgagctgaccaaggtgaagtatgtgactgagggcatgaggaagccagcgttcctgagcggcgagcagaagaaggctatcgtggacctgctcttcaagactaaccggaaggtgactgtgaagcagctcaaggaggactacttcaagaagattgagtgcttcgattccgttgagattagcggggtggaggatcggttcaatgcttcgctcgggacataccacgatctcctgaagatcattaaggataaggacttcctcgacaacgaggagaacgaggacattctcgaagatattgtcctgaccctcaccctcttcgaggatcgggagatgatcgaggagaggctcaagacatacgctcatctgttcgatgataaggtcatgaagcagctgaagcgcaggcggtacacagggtgggggcggctgagccggaagctgatcaacgggattcgggataagcagtccgggaagacaattctcgacttcctcaagtccgacgggttcgctaaccggaacttcatgcagctcattcatgatgactcgctgacattcaaggaggatattcagaaggcgcaggtttcggggcagggcgactcgctccacgagcatattgcgaatctggcgggctcccccgcgattaagaagggcattctgcaaaccgtcaaggtggttgatgagctggtcaaggtcatggggcggcataagccagagaatattgtcatcgagatggcgcgggagaatcagaccacacagaaggggcagaagaactcacgggagcggatgaagcgcatcgaggagggcatcaaggagctggggtcgcagatcctgaaggagcatcccgtggagaacactcagctgcaaaatgagaagctgtacctctactacctccagaacgggagggacatgtatgtggatcaggagctggatattaataggctgagcgattacgatgtcgaccacattgtcccacagtcgttcctgaaggacgacagcattgacaacaaggtgctgacccgctcggataagaacaggggcaagagcgataatgttccaagcgaggaggttgtgaagaagatgaagaactactggcggcagctcctgaacgcgaagctcatcacacagcggaagttcgacaacctcaccaaggctgagcgcgggggcctgagcgagctggacaaggcggggttcattaagaggcagctggtcgagacacggcagattacaaagcatgttgcgcagattctcgattcccggatgaacaccaagtacgatgagaacgataagctgattcgggaggtcaaggtaattaccctgaagtccaagctggtgtccgacttcaggaaggacttccagttctacaaggttcgggagatcaacaactaccaccacgcgcatgatgcctacctcaacgcggtcgtggggaccgctctcatcaagaagtacccaaagctggagtcagagttcgtctacggggattacaaggtttacgacgtgcggaagatgatcgctaagagcgagcaggagattggcaaggctaccgctaagtacttcttctactccaacatcatgaacttcttcaagacagagattaccctcgcgaatggcgagatccggaagaggcccctcatcgagacaaatggggagacaggggagattgtctgggataaggggcgggatttcgcgaccgtccggaaggtcctgtcgatgccccaggttaatattgtcaagaagactgaggtccagactggcggcttctcaaaggagtcgattctcccaaagaggaactccgataagctcattgctcggaagaaggattgggaccccaagaagtacgggggattcgactcccccactgttgcttactctgttctggttgttgctaaggtggagaaggggaagtcgaagaagctgaagagcgtgaaggagctgctcgggattacaattatggagaggtcatccttcgagaagaatcccatcgacttcctggaggccaagggctacaaggaggtgaagaaggacctgattattaagctgcccaagtactcgctcttcgagctggagaatgggcggaagcggatgctggcgtccgcgggggagctgcaaaaggggaacgagctggcgctcccctccaagtatgtgaacttcctctacctggcgtcgcactacgagaagctgaaggggtccccagaggataatgagcagaagcagctcttcgtcgagcagcataagcactacctggacgagattatcgagcagattagcgagttctcgaagcgggtcatcctcgcggatgcgaacctggataaggtgctcagcgcctacaataagcaccgggacaagccgattcgggagcaggcggagaatattattcacctcttcacactcaccaacctcggggcaccagctgcgttcaagtacttcgacactactatcgaccggaagcggtacacctcgacgaaggaggtgctcgacgccaccctcattcaccagtcgatcacaggcctgtacgagacacggattgacctgtcccagctcgggggcgac

SEQ ID NO: 56 - DNA, 4101 bp, Unknown
  Cas9
gacaagaagtactccattggcctggcgattgggacaaactcggtggggtgggccgtgattacggatgagtacaaggttccaagcaagaagttcaaggtcctcgggaacacagatcggcattcgattaagaagaatctcattggggcgctcctcttcgactcgggggagacagcggaggctaccaggctcaagcggacagccaggcggcggtacacaaggcggaagaatcgcatctgctacctccaggagattttctcgaatgagatggcgaaggtggacgacagcttcttccatcggctggaggagtccttcctggtggaggaggataagaagcacgagaggcatccaattttcgggaacatcgtggacgaggttgcgtaccatgagaagtaccctacaatctaccatctgcggaagaagctggttgactccacagacaaggcggacctgaggctgatctacctcgctctggcccacatgattaagttccgcgggcatttcctgatcgagggggacctgaatcccgacaattcggatgtggacaagctcttcatccagctggtgcagacctacaaccagctgttcgaggagaatcccatcaatgcgtcgggcgttgacgctaaggccattctgtccgctaggctgtcgaagagcaggaggctggagaacctgatcgcccagctgccaggcgagaagaagaatgggctcttcgggaatctgattgcgctctccctggggctgacaccgaacttcaagagcaatttcgatctggctgaggacgcgaagctccagctctcgaaggacacttacgacgatgacctcgataacctcctcgcgcagatcggggaccagtacgctgatctcttcctcgccgctaagaacctctcggatgctatcctgctctccgacattctccgggttaataccgagattacaaaggccccactgtcggcgtccatgatcaagcggtacgatgagcatcatcaggatctcaccctgctcaaggccctcgtgcggcagcagctgcccgagaagtacaaggagattttcttcgaccagagcaagaatgggtacgctggctacattgacggcggggcctcacaggaggagttctacaagttcatcaagccaatcctggagaagatggatgggacagaggagctgctggtgaagctcaaccgggaggatctgctcaggaagcagcggacgttcgacaacgggtcgattccccatcagatccacctgggggagctgcacgcgatcctgcgccggcaggaggatttctaccctttcctgaaggataatcgggagaagatcgagaagattctcaccttccggattccctactacgtcgggccactcgcgcggggcaatagcaggttcgcctggatgacacggaagagcgaggagacaatcaccccctggaacttcgaggaggttgtcgacaagggggcgtccgcccagtcattcattgagcggatgaccaatttcgacaagaatctgccaaatgagaaggttctcccaaagcatagcctcctctacgagtacttcactgtttacaacgagctgaccaaggtgaagtatgtgaccgagggcatgcggaagcccgcgttcctgtccggcgagcagaagaaggccattgtggacctcctgttcaagaccaatcgcaaggtcacagtcaagcagctcaaggaggattacttcaagaagatcgagtgcttcgactcggttgagattagcggggtggaggatcggttcaacgcgagcctcggcacttaccacgacctcctgaagatcatcaaggataaggacttcctcgacaacgaggagaacgaggatattctggaggacatcgtgctcaccctgacgctgttcgaggatcgggagatgatcgaggagcgcctgaagacctacgctcatctcttcgatgataaggtcatgaagcagctgaagaggaggcggtacaccgggtggggccgcctgagcaggaagctcattaacgggatcagggacaagcagagcggcaagaccatcctggacttcctcaagagcgatggcttcgccaaccggaatttcatgcagctcatccacgacgactccctcaccttcaaggaggacattcagaaggctcaggtcagcggccagggcgactcgctgcatgagcacatcgctaacctggcgggcagcccagccatcaagaagggcatcctccagacagtgaaggtcgtggatgagctggtgaaggtcatgggccggcataagcccgagaatattgtgattgagatggcgcgggagaatcagaccactcagaagggccagaagaactcgcgggagcgcatgaagaggatcgaggaggggattaaggagctgggcagccagattctcaaggagcaccccgtggagaatacccagctccagaacgagaagctgtacctctactacctccagaatgggcgggacatgtatgttgatcaggagctggacatcaatcgcctctcggattacgacgtggaccacatcgtgccccagagcttcctgaaggatgatagcatcgacaataaggtcctgacccgctccgacaagaatcgcggcaagagcgacaacgtgccgagcgaggaggtcgtgaagaagatgaagaactactggcggcagctgctgaacgcgaagctcattacacagcggaagttcgataacctgacgaaggcggagaggggcggcctctccgagctggacaaggcgggcttcattaagaggcagctcgtggagactcgccagatcaccaagcacgtggctcagatcctcgatagccggatgaatacgaagtacgatgagaatgacaagctcatccgggaggtgaaggtaatcaccctgaagtcaaagctcgttagcgatttccggaaggacttccagttctacaaggtgcgggagattaacaactaccatcatgcgcacgatgcgtacctcaatgcggtggtgggcacagccctgattaagaagtaccccaagctggagagcgagttcgtctacggggactacaaggtgtacgatgttcggaagatgatcgccaagagcgagcaggagattgggaaggccaccgctaagtacttcttctactcgaatattatgaatttcttcaagaccgagatcacactcgctaatggggagattcggaagcggcccctcatcgagactaacggggagactggcgagattgtgtgggacaaggggcgcgacttcgctaccgtgcgcaaggtcctctcgatgccccaggttaatattgttaagaagacagaggtgcagacgggcgggttctccaaggagtctatcctgccgaagcggaactcggacaagctgatcgcccgcaagaaggattgggaccccaagaagtacgggggattcgatagcccaaccgtggcttacagcgtcctggtggtcgccaaggttgagaaggggaagtcgaagaagctcaagagcgttaaggagctgctgggcatcaccatcatggagcggtccagcttcgagaagaatcctatcgacttcctggaggctaaggggtacaaggaggtcaagaaggacctgatcattaagctgcccaagtactctctgttcgagctggagaacgggaggaagcggatgctggcgtctgctggcgagctacagaagggcaatgagctggcgctcccctcgaagtatgtcaacttcctctacctggcttcccattacgagaagctgaagggctcgcccgaggataatgagcagaagcagctcttcgtggagcagcacaagcactacctcgacgagatcattgagcagatttcggagttctcgaagcgggtcattctcgcggacgcgaacctcgacaaggtcctctcggcgtacaacaagcaccgggacaagcccatccgggagcaggccgagaacattatccacctcttcacactgaccaacctcggcgctcccgccgcgttcaagtacttcgacaccaccattgaccgcaagagatacacatccaccaaggaggtgctggacgcgaccctcatccaccagagcatcacaggcctctacgagacacggatcgacctctcgcagctcgggggcgat

SEQ ID NO: 57 - DNA, 4092 bp, Unknown
  Cas9
gacaagaagtactcgatcggcctggcgattggcacaaacagcgtggggtgggctgtgatcactgatgagtacaaggtgccatcgaagaagttcaaggtgctggggaatacagaccggcattcgatcaagaagaatctcattggcgctctcctcttcgattccggcgagactgctgaggcgacccgcctgaagcgcaccgcccggcggcgctacactcggcggaagaataggatttgctacctccaggagattttctcgaatgagatggccaaggtggatgacagcttcttccaccgcctggaggagtcgttcctggtcgaggaggacaagaagcatgagcggcaccctatcttcgggaatatcgttgatgaggtcgcctaccacgagaagtaccccactatctaccatctccgcaagaagctcgtggacagcacagataaggccgacctccgcctgatctacctcgccctcgcgcacatgattaagttccgggggcacttcctcattgagggggatctgaatcccgataactccgacgtggacaagctgttcatccagctggtgcagacatacaaccagctgttcgaggagaatcccatcaacgcgagcggcgtggacgctaaggccattctgtcggctaggctctcgaagtcgaggcggctggagaacctgattgcgcagctccccggcgagaagaagaacgggctgttcgggaatctcatcgccctctccctcggcctcacaccaaacttcaagagcaatttcgacctggctgaggacgctaagctgcaactctcaaaggatacatacgatgacgacctggacaatctcctggctcagatcggcgaccagtacgctgacctgttcctcgcggccaagaatctgtcggacgcgattctcctcagcgacatcctgcgcgtcaataccgagattacgaaggctccactgtctgcgtcaatgattaagcggtacgatgagcatcaccaggatctgaccctcctgaaggcgctcgtgcggcagcagctgcccgagaagtacaaggagattttcttcgatcagagcaagaatggctacgccggctacatcgacgggggcgcgagccaggaggagttctacaagttcatcaagcccatcctggagaagatggacggcaccgaggagctactcgtgaagctcaatcgggaggatctcctccggaagcagcggacattcgataacgggtctatcccacaccagatccacctcggcgagctgcatgcgattctgcggcggcaggaggatttctaccctttcctgaaggacaaccgggagaagatcgagaagatcctcacattccggattccatactacgtcggccccctggcgaggggcaatagccggttcgcgtggatgacaaggaagtccgaggagactattaccccgtggaatttcgaggaggtggttgacaagggcgcttccgcgcagagcttcattgagcggatgacaaacttcgacaagaatctccccaacgagaaggtcctgccgaagcatagcctcctgtacgagtacttcaccgtctacaatgagctaactaaggtcaagtatgtgacagagggcatgaggaagccagccttcctctcaggcgagcagaagaaggccattgtggacctcctgttcaagacaaaccgcaaggtgacagtgaagcagctgaaggaggattacttcaagaagattgagtgcttcgactcagtggagatttcaggcgtggaggatcggttcaacgcgagcctggggacttaccacgacctgctgaagattattaaggacaaggacttcctggataacgaggagaatgaggacatcctggaggatattgtgctcaccctcaccctgttcgaggacagggagatgattgaggagaggctcaagacctacgcgcacctgttcgatgacaaggtcatgaagcagctgaagaggcggcgctacactgggtggggccgcctgtcgcggaagctgatcaacggcattcgggataagcagtccgggaagaccattctggatttcctgaagtcggacggcttcgccaacaggaatttcatgcagctgatccacgacgactccctcaccttcaaggaggacattcagaaggcccaggttagcggccagggggactcactccacgagcatattgccaatctggccggctctccagctatcaagaagggcatcctgcaaacagttaaggttgttgacgagctggttaaggtcatggggcggcataagcccgagaacattgtcatcgagatggctcgggagaaccagacaactcagaagggccagaagaactccagggagcgcatgaagcggattgaggagggcattaaggagctggggtcccagatcctcaaggagcaccctgtcgagaacactcagctgcaaaacgagaagctctacctgtactacctccagaacgggcgggatatgtatgtggatcaggagctggacatcaacaggctctccgactacgacgtggatcacattgtcccacagtctttcctcaaggatgattccatcgacaacaaggtgctgacgcgcagcgacaagaatagggggaagtcggacaacgttccgagcgaggaggtcgtgaagaagatgaagaattactggaggcagctcctgaatgcgaagctgatcactcagaggaagttcgacaatctgacaaaggcggagaggggcgggctctcggagctggataaggcgggcttcatcaagcggcagctcgttgaaacccggcagatcaccaagcatgtcgcccagatcctcgatagccgcatgaacaccaagtacgatgagaacgacaagctcattcgggaggttaaggtcattacgctgaagtccaagctcgtcagcgacttcaggaaggatttccagttctacaaggttcgggagattaacaactaccaccacgcgcatgatgcgtacctgaacgctgttgtcggcactgctctcatcaagaagtacccaaagctggagtccgagttcgtctacggggactacaaggtctacgatgtccggaagatgatcgccaagtcggagcaggagatcgggaaggctactgcgaagtacttcttctacagcaacattatgaatttcttcaagacggagattacgctggcgaacggggagattaggaagaggcccctcattgagactaatggggagacaggcgagattgtttgggacaagggccgcgacttcgcgactgtgcggaaggtcctgtccatgccacaggtgaatattgttaagaagacagaggtgcagactgggggcttctcgaaggagagcattctcccaaagcggaacagcgataagctcatcgcgcgcaagaaggattgggaccctaagaagtacggcggcttcgattctcccactgtggcctactccgttctcgtggttgccaaggttgagaaggggaagtcgaagaagctgaagtcggtcaaggagctgctcgggattacaatcatggagcggagcagcttcgagaagaaccctattgatttcctggaggccaagggctacaaggaggttaagaaggatctcattatcaagctccctaagtactctctgttcgagctggagaatggccggaagaggatgctggcctcggctggcgagctacagaaggggaatgagctggccctcccgtcgaagtatgtgaatttcctgtacctcgcgtcgcactacgagaagctcaagggcagcccggaggataatgagcagaagcagctcttcgtggagcagcataagcactacctggacgagatcattgagcagatcagcgagttctcgaagcgggttattctggctgatgctaacctggacaaggttctgagcgcctacaataagcatcgcgacaagccgattcgcgagcaggcggagaatattatccacctgttcaccctcactaacctcggggctcccgcggccttcaagtacttcgataccacaatagataggaagcggtacacctcgacgaaggaggtcctcgacgccacactcatccatcagtcgattacaggcctgtacgagacacggattgacctctcgcagctg

SEQ ID NO: 58 - DNA, 4101 bp, Unknown
  Cas9
gacaagaagtattccataggcctggctatcggcaccaacagcgtgggctgggccgtcatcaccgacgagtacaaagtgccgagtaaaaagttcaaagtgctcggcaacaccgaccgccactccataaagaaaaacctgatcggggcgctcctgttcgacagcggcgagacggcggaggccacccgcttgaaacgcacggcccgacggcgctacacgcggcgcaagaaccggatctgttacctacaggagattttctctaacgagatggcgaaggtggacgactcgttctttcaccgcctcgaagagtccttcctcgtggaggaggacaagaaacacgagcgccacccgatcttcggcaacatcgtggacgaggtggcctaccacgagaagtacccgaccatctaccacctccggaagaaactcgtggacagcacggacaaggccgacctgaggctcatctacctcgccctggcgcacatgattaagttccggggccacttcctgatcgagggcgacctgaacccggacaacagcgacgtggacaagctgttcatccagctagtccagacctacaaccagcttttcgaggaaaaccccatcaacgccagcggggtggacgcgaaggcgatcctgtccgcccggctgagcaagtcccggcggctggagaacctcatcgcgcagttgcccggcgagaagaagaacgggctgttcgggaacctgatcgccctctccctggggctcaccccgaacttcaagtccaacttcgacctcgccgaggacgccaaactacagctgagcaaggacacctacgacgacgacctcgacaacctgctggcccagatcggggaccagtacgcagacctgttcctcgccgccaagaacctctccgacgccatcctgctgtcggacatcctgcgggtgaacacggagatcacgaaggccccgctctcggcctcgatgattaaacgctacgacgagcaccaccaggacttgaccctcctcaaggcgctggtccgccagcagcttcccgagaagtacaaggaaatctttttcgatcagagcaagaacgggtacgccgggtacatcgacggcggggcgtcccaggaggagttctacaagttcatcaagcccatcctggagaaaatggacgggaccgaggagctgctcgtgaagctcaaccgcgaagatttgctccgcaagcagcgcacgttcgacaacgggtcgatcccgcaccagatccacctgggcgagctgcacgcgatcctcaggcgtcaggaagacttctaccccttcctcaaggacaaccgcgagaagatagagaagattctgaccttcagaattccttattacgtgggcccgctggctcggggcaactcgcgcttcgcctggatgacgcgcaagtccgaggagaccatcaccccgtggaacttcgaggaggtggtggataagggtgcctcggcccagtccttcatcgagcggatgaccaacttcgacaagaacctgccgaacgagaaggtgctccccaagcacagcctgctctacgaatatttcacggtgtacaacgagctgacgaaggtcaagtacgtgaccgagggaatgaggaaacctgcattcctctccggggagcagaagaaagccatagtcgacctcctgttcaagaccaaccggaaggtcaccgtcaagcagctcaaggaggactacttcaagaagatcgagtgcttcgattcagtggagatcagcggcgtcgaggaccggttcaacgccagcctgggcacctaccacgacctgctcaagatcatcaaggacaaggacttcctcgacaacgaggagaacgaggacatcctggaggacatcgtgctgaccctgacgctcttcgaggaccgcgagatgatcgaggagcgcctcaagacctacgcccacctgttcgacgacaaggtgatgaagcagctcaagcggcggagatatactgggtggggccgcctctcccggaagctcattaacggtatcagggataagcagtccgggaagacgatcctcgacttcctcaagtcggacgggttcgccaaccgcaacttcatgcagctcatccacgacgactccctgacgttcaaggaggacatccagaaggcccaagtgtctggtcaaggtgactcgctccacgagcacatcgccaacctcgcgggcagcccggccatcaagaagggaatactccagaccgtcaaggtggtggacgagctggtgaaggtcatgggccgccacaagccggagaacatcgtcatcgagatggcgcgggagaaccagaccacgcagaaggggcagaaaaatagccgtgagcgcatgaagcgcatcgaggaggggattaaggagttgggcagccagatcctcaaggagcaccctgtggagaacacgcagttgcaaaacgagaagctctacctgtactacctccagaacgggagggatatgtacgtggaccaagaactggacatcaaccgcctgtccgactacgacgtggaccacatcgtgccgcagagcttcctcaaggacgacagcatcgacaacaaggtgctcacccggtccgacaagaatcggggcaagtccgacaacgtgcccagcgaggaggtcgtcaaaaagatgaaaaactactggcgacaactactgaacgccaagctcatcacccagcgcaagttcgacaacctcacaaaagccgagcgcggcgggttgagcgagctggacaaggccgggttcatcaagcgccagctcgtcgagacgcgccagatcacgaagcacgtcgcgcagatactcgacagccggatgaacaccaagtacgacgagaacgacaagctcatccgggaggtgaaggtcatcaccctcaagtcgaagctcgtgagcgacttccgcaaggacttccagttctacaaggtccgggagatcaacaactaccaccacgcccacgatgcttatcttaacgccgtggtggggacggccctcattaagaaatacccgaagctggagtcggagttcgtgtacggcgactacaaggtgtacgacgtcaggaagatgatcgccaagtccgaacaggagatcgggaaggccacggcgaaatacttcttctacagcaacatcatgaacttcttcaagaccgagatcaccctcgccaacggcgagatccgcaagcgcccgctcatcgagacgaacggggagaccggcgagatcgtctgggacaaggggcgcgacttcgccactgtgcggaaggtgctgtcgatgccccaggtcaacatcgtcaagaagacggaggtccagacgggcgggttcagcaaggagagcatcctgccgaagcgcaacagcgacaagctgatcgcccgcaaaaaggactgggatccaaaaaagtacggcggcttcgacagccccaccgtcgcctacagcgtcctcgtcgtcgctaaagtcgagaagggcaagtccaaaaagctcaagagcgtcaaggagctgctcgggatcaccatcatggagcggtccagcttcgagaagaacccaattgatttcctggaggcgaagggctacaaggaggtcaagaaagacctcatcataaagctgccgaagtactcactcttcgagctggagaacgggcgcaagcggatgctggcgtcggccggagagctccaaaagggcaacgagctggcgctgccgagcaagtacgtgaacttcctctacctggcgtcccactacgagaagctcaagggcagtccagaggataacgagcagaagcagctattcgtggagcagcacaagcactacctggacgagatcatcgagcagatcagcgagttctccaagcgcgtcatcctggcggacgccaacctggacaaggtgctgtccgcgtacaacaagcaccgcgacaagccgatccgcgagcaagccgagaacatcatccacctgttcaccctcacgaacctcggggcacccgccgccttcaaatatttcgacacgaccatcgaccgcaagcgctacaccagcacgaaggaggtgctcgacgccaccctgatccaccagagcatcaccgggctgtacgagacccgcatcgacctctcgcagctcggcggggac

SEQ ID NO: 59 - DNA, 4101 bp, Unknown
  Cas9
gacaagaagtacagtattggattggccatcgggacgaacagcgtgggctgggccgtcatcaccgacgagtacaaggtgccatccaagaagtttaaggttctggggaataccgaccgccactcgatcaagaaaaatctcatcggggcgctgcttttcgacagcggcgagacggcggaagcgacgcggctcaagcggacggctcgtcgccgttacacccggcgtaagaaccgcatctgttacctccaggagatattcagcaacgagatggcgaaggtggacgactcctttttccaccgtcttgaggagtccttcctggtcgaggaggacaagaagcacgagcgccacccgatcttcgggaacatcgtggacgaggtggcctaccacgagaagtaccccacgatctaccacctccgcaaaaaactcgtggactcaactgacaaggccgatttgaggcttatctacctcgccctcgcccacatgattaagttccgtgggcacttcctaatcgagggtgacctcaaccccgacaactctgacgtggacaagctgttcatccagcttgtgcagacctacaatcagctctttgaggagaatccgatcaacgcatctggtgtggacgcaaaggccatcctcagcgcgcggctgagcaagtctaggcggttggagaacctgatcgcccaactgcccggcgagaagaaaaatggcctcttcggcaacctgatcgccctgtcgctggggctcacgccgaacttcaagagtaactttgacctggcggaggacgctaagctccagctatctaaggacacatacgacgacgacctggacaacctgctggcccagatcggcgaccagtacgccgacctcttcctagccgccaagaacctgtccgacgccatcctcctcagcgacatcctgcgcgtgaacacggagatcacgaaggctccgctcagcgcctccatgattaagcggtacgacgagcaccaccaagacctaactttactcaaagccctcgtgcggcagcagcttcccgagaagtacaaagagatattttttgatcagtccaagaacggttatgcgggctacatcgacggcggcgcgagccaggaggagttctacaagttcatcaagcccatcctggagaagatggacggcacggaggagctgctcgtgaagctcaaccgtgaagacctcctgcgaaagcagcgaaccttcgacaacggttcgatcccgcaccagatccacctcggggagctgcacgccatcctgaggcgacaggaggacttctaccctttcctaaaggacaaccgcgagaagattgaaaaaatcctgacgtttcgcataccctactacgtcggcccgctggcgcgcggcaactcccggttcgcctggatgacccgtaagagcgaggagacgatcaccccgtggaacttcgaggaggtcgtggacaagggcgcgagcgcgcagagcttcatcgagcgcatgaccaacttcgacaagaacctcccgaacgagaaggtgctcccaaagcactccctcctgtacgagtatttcaccgtgtacaacgagttgacaaaggtgaagtacgtgacggagggaatgcggaagcctgcgttcctctcgggcgagcagaagaaggcaatcgtggacctgctcttcaagaccaaccggaaggtgacggtgaagcagctcaaggaggactacttcaaaaaaatcgagtgcttcgactccgtggagataagcggcgtggaggaccgattcaacgcctccctcggcacctaccacgacctccttaagatcatcaaggacaaggacttcctggacaacgaggagaacgaggacatcctggaggacatcgtgctcaccctgaccctcttcgaggaccgggagatgatcgaggagcgcctcaagacgtacgcccacttgttcgacgacaaggtgatgaagcagctcaagcggcggcgatacaccgggtggggccgcctatcccgcaaacttatcaacggcatccgcgacaagcagtccggcaagacgatcctggatttcctcaagtcggacgggttcgccaaccggaacttcatgcagctcatccacgacgacagcctcacgttcaaggaggacatccagaaggcccaagtgagcggtcaaggggacagcctccacgagcacattgcgaaccttgctgggagccctgcgatcaagaaggggatattgcaaaccgtgaaggtcgtggacgagttggtgaaggtcatggggcgacacaagcccgagaacatcgtgatcgagatggccagggaaaatcagaccacgcagaagggccaaaaaaacagccgcgagcggatgaagcggatcgaggagggcatcaaggagctggggtcgcagatcctcaaggagcacccggtggagaacacgcagctccagaacgagaagctgtacctctattacctacagaacgggcgggatatgtacgtggaccaggagctagacatcaaccgcctgtccgactacgacgtggaccatatcgtcccgcagtcgttcttgaaggacgacagcatcgacaacaaggtgctcacaagatcggataagaatcgaggcaagtccgacaacgtgccctcggaggaggtggtcaagaaaatgaaaaactactggcggcagttgctgaacgccaagctcattacgcagcggaagttcgacaacctgacgaaggctgaacgtggtgggctcagcgagctagacaaggcggggttcatcaagcggcagctcgtcgagacccggcagatcaccaagcacgtggcgcagatcctggactcgcgcatgaacaccaagtacgacgagaacgacaagctcatccgtgaggtgaaggtcatcacccttaagtctaagctggtcagtgacttccgcaaggacttccagttctacaaggtccgggagatcaacaactaccaccacgcgcacgacgcctacctcaacgcggtggtggggacggcgcttattaagaaatatcccaagctggaaagcgagttcgtttacggcgactacaaggtgtacgacgtccgcaagatgatcgcaaagtcggaacaggaaatcggaaaggcgacggccaaatatttcttttactccaacatcatgaatttttttaagacggagatcaccctggcgaacggggagatccgcaagcggcccctcatcgagaccaacggggagacgggcgagatcgtctgggacaagggccgggacttcgccaccgtgcggaaggtgctttctatgcctcaagtcaatatcgtcaaaaagacagaggtgcagaccggcgggttcagcaaggagtctatcctgccgaagcgcaactcggacaagctcatcgcgcgcaagaaagactgggaccccaaaaaatatggcgggttcgactcgccgaccgtcgcctacagcgtcctcgtggtggctaaggtcgagaagggcaagagcaaaaagctaaagtcggtgaaggagctgctgggcatcaccatcatggagcgctcgtctttcgagaagaatccaatcgacttcctagaggcgaaggggtacaaggaggtcaaaaaggatcttatcatcaaactgccgaagtacagtctgttcgagctggagaacgggcggaagcggatgctggctagtgcgggcgagttgcagaagggcaacgagttggcactgccctccaagtacgtgaacttcctgtacctggcctcccactacgagaagctcaaggggagccccgaggacaacgagcagaagcagctattcgtcgagcagcacaagcactacctggacgagatcatcgagcagatcagtgagttctccaagcgggtcatcctcgcggacgccaacctggacaaggtgctgagcgcgtacaacaagcacagggacaagccaatcagggaacaggccgagaacatcatccacctgttcaccctgaccaacctgggtgcaccggctgccttcaagtactttgacacgaccatcgaccggaagcgctacacctccacgaaggaggtgctggacgccacgctgatccaccagagcatcaccgggctctacgagacacggatcgacctgagccagcttggcggggac

SEQ ID NO: 60 - DNA, 4092 bp, Unknown
  Cas9
gacaaaaagtattccattggactcgctatcggcacgaacagcgtcgggtgggcggtcatcactgacgagtacaaggtgccgagcaagaagtttaaggtgctgggaaacaccgacaggcactcgatcaagaaaaatcttatcggggccctactcttcgactccggagaaaccgccgaggccacccggttgaagcgcacggcccgccgtcgctacaccaggcgcaagaaccggatctgctacctccaggagatattcagcaatgagatggcgaaggtggacgactcgttttttcacaggctagaggagtctttcctcgtggaggaggacaagaaacacgagcgccaccccatcttcggcaacatcgtggatgaggtggcatatcacgagaagtacccaaccatctaccacctccgcaaaaagctcgtggactctaccgacaaggccgacctccgtctgatctacctcgcgctggcccacatgattaagttccgaggacactttctgatcgagggcgacctgaacccagacaacagcgacgtggacaagctgttcatccaacttgtccagacctacaatcagctcttcgaggagaaccctatcaacgcctcgggcgtggacgcgaaggccatcctgtccgcccgcctgagcaagtcgcggcggctggagaacctgatcgcccagctccccggcgaaaaaaagaacggcctcttcggcaacctcatcgcgttgtcgctggggctcaccccgaacttcaagtccaacttcgacctggccgaggacgctaaactccagctctcgaaggatacctacgacgacgacctcgacaacctgctggcccagatcggcgaccagtacgcggaccttttcctggcggccaagaacctgagcgacgcgatcctccttagcgacatactccgtgtgaacaccgagatcacgaaggccccgctctccgcgtccatgattaagcgctacgacgagcaccaccaagaccttaccctgcttaaggcgctggtcaggcagcagttaccggagaagtacaaggagatcttttttgatcaatctaagaacggttacgccgggtacatcgacggcggcgcgtcccaggaggagttctacaagttcatcaagccgatcttggagaaaatggacgggaccgaggagctgctcgtgaagctcaaccgcgaagacctcctccgcaagcagcgcaccttcgacaacgggagcatcccgcaccagatccacctgggagagctgcacgcgatcctgcggagacaagaggacttctaccccttcctcaaggacaaccgggagaagattgaaaaaatacttacttttcgtatcccgtactacgtcgggccccttgcgaggggcaactccagattcgcgtggatgacccgcaagtccgaggagaccatcaccccgtggaacttcgaggaggtggtggacaagggcgcgtcggcccagtcgttcatcgagcgcatgaccaacttcgacaagaaccttccgaacgagaaggtgctcccgaagcacagcctgctctacgaatattttactgtgtacaacgagctgacgaaggtcaagtacgttacggaggggatgaggaagcccgccttcctctccggcgagcagaagaaagccattgtggatctcctgttcaagaccaaccgcaaggtgacggtgaaacagctcaaagaggactacttcaagaagatcgagtgcttcgactccgtagagatcagcggggtcgaggaccgcttcaacgcctcgctgggcacgtaccacgacctgctaaagattatcaaggacaaagacttcctagacaatgaggagaacgaggacattctggaggacatcgtgctgactctgacgctgttcgaagaccgcgagatgatcgaggagcggcttaagacgtacgcccacctgttcgacgacaaggtgatgaagcagttgaaacggcggcgctacaccgggtggggccgcctctcccgcaagctcatcaacggcatccgcgacaagcagtcggggaagacgatcctggacttcctcaagagcgacggcttcgccaaccgaaacttcatgcagctaatccacgacgacagcctgacgttcaaggaggacatccagaaggcccaagtgagcggccagggagactcgctacacgagcatatcgccaacctggctggcagcccggcgattaagaaaggaatcctccaaaccgtcaaagtggtggacgagctggtgaaggtgatgggccgccacaagcccgagaacattgtgatcgagatggcgcgggagaaccagacgacgcagaagggccaaaaaaatagcagggaaaggatgaagcgaatagaggaggggatcaaggagctggggagccagattctcaaagagcacccggtcgagaacacacagctccagaacgagaagctgtacctctactacctccaaaacggccgcgatatgtacgtggaccaggaactagacatcaaccggctgagcgactatgacgtggaccacatcgtgccgcagtccttcctcaaggacgactcgattgacaacaaagtgctcactagatccgacaagaacagaggcaagagcgataacgtcccgtcggaggaggtcgtcaagaaaatgaaaaactactggcggcagctcctaaacgccaagctcatcacgcagcgtaagttcgacaacctgacgaaggcggagcggggcgggctgagcgagctggacaaagcggggttcatcaagcggcagctcgttgagacgcggcagatcacaaagcacgtcgcgcaaatcctcgactcccgcatgaacaccaagtacgacgagaacgacaagctcatccgggaggtgaaggtcattacccttaaatcgaagctcgtcagcgactttcgtaaggacttccagttctacaaggtcagagagatcaacaactaccaccacgcccacgacgcctatctgaacgccgtggtgggcaccgcgcttattaagaagtaccccaagctggagtccgagttcgtgtacggcgactacaaggtttatgacgtcaggaagatgatcgccaagtcggaacaggagatcggaaaagctaccgccaaatatttcttctatagcaacatcatgaacttcttcaaaaccgagatcaccctcgccaacggcgagatccggaagcgcccgctcatcgagaccaacggggagaccggggagatcgtctgggacaaggggcgggacttcgctactgtccgaaaggtgctctccatgccacaagtgaatatcgtcaagaaaacagaggtgcagaccggagggttcagtaaggagtccatcctgcccaagcggaactccgacaagctaattgctcgcaaaaaggattgggatcctaaaaaatatggcggcttcgactcgcccacggtcgcctactctgtgctggtcgtggcgaaggtggagaagggcaagtccaagaagctcaagagcgtcaaggagctgctggggatcacgatcatggagcgtagttcgtttgagaagaatcccatcgacttcctggaggctaagggctacaaggaggtcaaaaaggacctcatcattaagctgccgaagtacagcctcttcgagctggagaacgggcggaagcgtatgctcgcctccgctggggagttacaaaaggggaacgagctggcgctgccgtctaagtacgtcaacttcctgtacctggcctcccactacgagaagctcaaggggtcgccggaggacaacgagcagaagcagctcttcgtagagcagcacaagcactacctggacgagatcatcgagcagatttcagagttctcaaagcgggtcatcctcgccgacgccaacctggacaaggtgctctcggcctacaacaagcaccgggacaagccgatccgcgaacaggccgaaaacatcatccacctgttcacgctcaccaacctcggtgccccggcggccttcaagtactttgacacgaccatcgaccggaagcgctatacctcgacgaaggaggtgctggacgccaccctgatccaccagtccatcaccgggctttacgagacccggatcgacctctcgcagcta

SEQ ID NO: 61 - DNA, 4101 bp, Unknown
  Cas9
gacaagaagtatagtattggactcgccatcggaaccaactctgtggggtgggctgttattacagatgaatataaggtgccatccaaaaagtttaaagttctgggcaatactgatagacactcaatcaagaagaatctgataggtgcacttctgtttgatagtggagagactgccgaggcaaccagacttaaaaggactgcaagaagaagatataccagaagaaagaataggatttgctatttgcaggaaatcttcagcaacgaaatggccaaggttgatgactcatttttccataggttggaggagagttttcttgtggaggaagataagaagcacgaaagacacccaattttcgggaatatagtggacgaggtggcttatcatgagaagtatcccactatctaccacctgagaaagaaacttgtggactcaaccgataaggctgatcttaggcttatatacttggcccttgcacatatgatcaaattcaggggccattttcttatcgaaggcgatcttaatcccgataactcagatgtggacaagctgtttatacaacttgtgcaaacctacaatcaactcttcgaggagaatcccattaacgcctccggcgtggatgcaaaagccatactgtcagccagactgagcaaaagtaggagactggagaatcttatagcccaactgcccggtgaaaagaagaatgggctcttcggaaatctgatcgctctttcattggggttgacacccaactttaagagtaactttgacttggcagaagatgcaaagttgcagctcagtaaagacacatatgacgatgaccttgacaatctcttggcacaaataggggatcaatacgctgaccttttcctcgctgccaagaacctcagcgacgctatactgttgtccgacattcttagggttaataccgaaattacaaaggcccctcttagtgcaagtatgatcaaaaggtatgatgagcatcaccaagaccttacactgctgaaggctctggttagacagcaactccctgaaaagtataaggaaatattcttcgaccaaagtaagaacgggtacgccggttatattgatgggggcgcaagtcaagaagaattttacaaattcatcaagccaattcttgaaaagatggacgggactgaggaattgctggtgaaactgaatagagaggaccttcttagaaaacagaggacatttgacaatgggtccatcccacaccagattcatctgggggaactccacgcaatattgaggagacaagaagacttttacccattccttaaggataatagagagaaaatcgaaaaaatcctgactttcaggattccttactatgttgggccactggccagggggaactcaagattcgcttggatgacaaggaagtcagaagaaaccataaccccttggaattttgaagaggtggttgataagggggcatcagcccagtctttcatagagaggatgaccaactttgataaaaatcttccaaatgagaaggttttgccaaaacatagtcttttgtacgagtactttactgtttataacgaattgaccaaggtgaagtatgtgaccgagggaatgaggaagccagcatttttgtccggggagcaaaagaaagcaatcgttgatcttctcttcaagaccaacagaaaagtgaccgtgaaacaactgaaggaagactacttcaaaaagatagaatgtttcgattcagtggaaattagcggtgttgaagacaggttcaatgcttcattgggtacttaccacgacctgttgaagataatcaaagacaaggactttctcgataatgaggagaacgaagacatcttggaagacattgtgcttacactcactttgtttgaggacagggaaatgattgaggaaagactcaaaacttacgctcatttgtttgatgataaggttatgaaacaactaaaaagaagaaggtacaccggctggggaagattgagtaggaaactgatcaacggtattagagataaacaatccggaaagactatcctcgatttccttaagagtgatggctttgcaaataggaattttatgcagctgattcatgacgactcacttaccttcaaagaagacatccaaaaagctcaggtgtctgggcaaggcgacagtctgcatgaacatatagctaacttggctgggagtcccgccatcaagaaggggatacttcaaacagttaaagttgtggacgaattggtgaaggtaatgggaaggcacaagcctgaaaatatagtgatagaaatggcaagggaaaatcaaacaacccagaagggacagaagaacagtagggaaaggatgaaaaggatagaagaggggatcaaagagcttggtagccagatcctcaaggaacatccagtggagaatacccaacttcaaaacgagaaactctatttgtactacttgcagaacggaagagatatgtatgtggaccaagagcttgatattaacaggctgagcgattatgacgttgaccacatagtgccccaatcattcctcaaggatgactctattgataataaggtgctgacaaggagtgacaagaatagagggaaatccgacaacgttccatccgaggaagttgtgaagaagatgaagaactactggaggcagttgctgaacgctaagctcattacccagaggaaattcgataacctgaccaaagcagagagaggcgggctgagcgaactcgataaagcaggtttcatcaagagacaactcgtggagactaggcaaattactaagcacgtggctcaaatactcgacagcaggatgaacacaaagtacgacgagaacgacaagctcattagagaggttaaggttattactctgaaaagtaaattggttagcgatttcagaaaggatttccaattctataaggttagagagatcaacaattatcatcatgcacatgatgcctatctgaatgctgtggttggtacagcccttatcaagaagtaccctaagctagagagcgagtttgtgtacggagattataaggtgtatgatgtgaggaaaatgatcgctaaaagtgagcaagagattggaaaggctaccgccaaatacttcttttattccaatattatgaatttcttcaagacagaaatcaccctggctaacggcgagataaggaagaggccgcttatcgaaactaatggggagacaggcgaaatagtgtgggacaaagggagggatttcgcaactgtgaggaaggttttgagcatgcctcaggtgaatatcgttaagaaaaccgaagttcaaactggagggttctctaaggaaagcattctccccaagaggaactccgacaagctgattgctagaaagaaagactgggaccccaagaagtatggcggattcgactcacccactgtggcatatagcgttctcgtggtggcaaaggttgaaaagggtaaatccaaaaaactcaaatccgtgaaggaactccttggcataactattatggaaaggagtagctttgaaaagaatcccatcgactttctcgaagctaagggctataaggaagttaagaaggaccttataatcaaacttccaaaatactccctttttgagttggaaaacggcagaaagagaatgttggccagtgccggggagcttcaaaagggcaacgaactggctctgcctagcaaatatgtgaactttttgtatctggcatcacactacgagaaacttaaaggctctcctgaggacaacgagcaaaaacagctctttgttgaacagcataagcactacctcgacgagattattgagcagatcagcgagttctcaaagagagttattctggctgacgctaatcttgacaaggttttgtccgcttacaacaaacacagggataagccaatcagggagcaggcagaaaacataatccatctctttaccctgacaaacctcggtgcccccgctgctttcaagtattttgatactaccattgacaggaagagatatacttccactaaggaagtgctcgacgcaaccctcatacaccaaagtatcacaggcctctatgaaactaggatagatttgtctcaacttgggggcgat

SEQ ID NO: 62 - DNA, 4101 bp, Unknown
  Cas9
gacaaaaagtattccatcgggcttgctatcggaaccaactctgtggggtgggcagttattaccgacgaatacaaggtgcccagcaagaagtttaaggttctggggaacacagatagacatagcataaagaaaaacctgataggcgcactgttgttcgactccggggaaacagccgaagctaccaggctgaagagaactgcaagaagaaggtacaccagaagaaaaaacagaatatgttatctccaagagattttctctaacgagatggccaaggtggacgactcattctttcacagactggaagaatctttccttgtggaagaagataagaaacacgagaggcaccctatttttggcaatatcgtggatgaggtggcttaccacgaaaaataccctacaatataccacctcaggaaaaaattggttgatagtacagacaaggccgacctcaggctcatctatttggccctggcccatatgattaaattcagggggcactttctcatcgagggagatttgaaccccgacaacagtgatgttgataagctctttattcagctcgtgcagacttacaatcagttgtttgaggaaaaccccattaatgcttccggggtggacgccaaggcaatcctttctgcaagactctcaaagtcaaggagactcgaaaatctgatagcacagcttccaggagagaagaagaacgggctctttggaaacctgatcgctctgtcactcggactcacacccaatttcaaaagcaattttgatttggcagaggacgctaagctgcaactcagtaaggatacctacgacgatgacttggataatctgctcgcacaaattggggaccagtatgcagacctgtttctcgcagctaagaacttgagtgacgccatattgctcagtgacatcctcagggttaataccgagattacaaaagctccactctctgcaagcatgatcaagaggtatgacgagcaccatcaagacctgacactccttaaggcgttggttaggcagcaacttcctgaaaagtataaggaaatcttcttcgatcaaagcaaaaacggctacgccggctatatagacgggggagcatcccaagaagaattttataagttcataaaacctatattggagaagatggacgggacagaggaattgctcgtgaaactgaacagggaggatctcctcaggaagcaaaggaccttcgacaatggctccatcccacatcagattcacctcggcgaactgcacgcaatactgagaagacaagaggacttttatcctttcctgaaggacaacagggagaaaatcgagaaaatcttgacattcagaatcccatactacgttgggcctctggccagaggtaacagtaggttcgcctggatgactaggaaatcagaggagactattacaccctggaactttgaagaagttgttgataagggagcttcagcacaatcattcatcgaaagaatgacaaactttgacaaaaatctgcctaatgagaaagtgctcccaaaacattccctgctgtatgagtattttaccgtttataacgagcttaccaaggtgaaatacgttactgaaggtatgagaaagccagcttttctttcaggggagcaaaagaaggctatcgtggatcttctctttaagaccaacagaaaggttaccgtgaagcagcttaaggaagactactttaaaaagatcgagtgttttgactcagtggaaataagcggtgttgaagatagattcaacgcatccttgggaacttatcatgatcttcttaagataatcaaggataaagactttctcgacaacgaggaaaacgaagatatactggaggacatagttctgacacttactttgttcgaggatagggagatgatcgaggaaagactgaaaacatatgctcaccttttcgacgacaaagttatgaaacaactcaagagaaggagatatacagggtgggggagattgagcaggaaactgattaatggtatcagagacaaacagtcaggaaaaacaatactcgactttttgaaatcagacgggttcgcaaataggaatttcatgcagcttatacacgacgattcacttacttttaaagaggacattcaaaaggctcaagttagtggacaaggtgactccctccacgaacacatcgcaaatctcgctggcagccctgcaattaagaagggtatactccagacagttaaggttgttgacgagctggttaaagtgatgggaagacacaaacccgagaacatagtgatagagatggccagggaaaaccaaaccactcaaaaagggcagaaaaattccagagagaggatgaaaaggattgaagaaggtatcaaggagctgggtagccaaattctgaaagaacatcctgtggaaaacactcaactccagaatgagaaactctatctgtactatctgcaaaatgggagagatatgtatgtggaccaggaactggacataaacaggctctcagattacgatgtggatcatatcgtgccacagtcctttcttaaggatgatagcatcgacaataaggtgcttaccaggtccgacaagaacaggggaaagtcagataacgtgccttctgaagaagttgttaaaaagatgaagaactactggagacagctgcttaacgctaagctcataacacagaggaagtttgacaacttgaccaaggccgagagaggcggactctcagaattggataaggcagggttcataaaaaggcagctggtggaaacaaggcagataactaaacatgtggctcagatcctcgatagtaggatgaatacaaaatacgatgagaacgacaagctcataagggaggttaaagtgataactctgaaatccaaactggttagcgattttaggaaggatttccagttttacaaagttagggagatcaacaattatcatcacgcccacgatgcctacttgaacgcagttgtgggtactgcacttatcaaaaagtaccctaagctggaatccgagtttgtttatggagactataaggtgtacgacgttagaaaaatgattgcaaagtcagagcaggagatagggaaagccactgcaaaatatttcttttatagcaatatcatgaatttctttaagacagaaatcacactggccaatggggaaataaggaagaggcccctgatcgaaactaatggcgagacaggggagattgtgtgggataaaggtagggactttgcaacagtgaggaaagtgctgagcatgccccaagttaatatcgttaaaaagaccgaggttcaaacagggggctttagtaaggaaagcattttgcccaagaggaatagtgacaaattgattgctaggaaaaaagattgggaccccaaaaagtatggcggatttgatagccccactgttgcttactccgtgctcgtggttgcaaaggtggagaagggaaagagcaagaaactgaagtcagttaaggaactccttggtatcactatcatggaaagaagctcctttgagaagaaccctattgacttcctggaggctaaagggtacaaagaggttaagaaagaccttatcattaaattgcccaaatatagtcttttcgagcttgaaaacggaagaaagaggatgcttgcatccgctggcgaattgcaaaagggcaatgagcttgctctcccttccaagtatgtgaacttcctttatcttgcctcacactatgaaaaactcaaaggttcacccgaagacaacgaacaaaagcaactatttgtggaacaacacaagcactacctggacgaaatcattgagcaaatttctgagttttcaaaaagggtaatcttggctgacgcaaatctcgacaaagttttgtcagcttacaacaaacatagagataagccaattagagagcaagctgagaatatcatccatctgtttaccctgactaaccttggagcgcctgctgcttttaaatatttcgacaccacaatcgacaggaagaggtacactagcactaaggaagttctcgacgccaccctcatccaccagagtattacaggcctgtacgagacaagaattgatctttctcaacttggtggtgac

SEQ ID NO: 63 - DNA, 4101 bp, Unknown
  Cas9
gataagaagtactcaatcggtctggcaatcggaaccaactctgtgggttgggcagtgattacagatgagtataaggtgccaagcaaaaaattcaaggtgctgggtaataccgacagacacagcattaagaagaatttgattggagcactcctctttgactcaggggaaacagcagaggcaacaaggctgaagaggacagcaaggcggaggtacacaaggcggaaaaacaggatatgctacctccaggaaatctttagcaacgagatggctaaagtggatgatagctttttccatagactcgaagaatcctttcttgttgaagaggacaaaaagcatgaaaggcatcccatcttcggcaatatagttgatgaggttgcataccatgagaagtaccccacaatctaccacctcagaaagaaacttgtggactccacagataaagcagacctgaggctcatatacctcgcactcgcacacatgatcaagttcagagggcactttctcatcgaaggtgacctgaatccagataattcagatgtggataaactgtttatacagctggtgcaaacatacaaccaacttttcgaggaaaacccaatcaatgcctccggtgttgatgcaaaggccatcctgtcagcaagactcagcaaaagcaggcggctcgaaaacctcatcgcccagcttcccggtgaaaagaagaacgggctctttggtaatctcatcgcattgagccttggtcttactccaaacttcaagagcaattttgatctggcagaggatgctaaactgcaactctcaaaggacacatatgacgatgaccttgacaatctgttggcccagatcggggaccaatatgcagacctcttcctggccgcaaagaatctgtcagatgcaatcctcttgtccgacatactgagagttaacactgagatcacaaaggcacctctgtccgcctccatgattaagagatacgatgagcatcaccaggatctgactttgctcaaagccctcgttagacagcagttgccagaaaagtacaaagaaatattctttgatcaatcaaaaaacggatatgcagggtacatcgacggtggggcaagccaggaagagttctacaaattcatcaaacctatcctggaaaagatggatgggacagaagagctgctggttaagctgaatagggaagacctcctcagaaagcagaggacatttgataacgggagcatccctcatcaaatccacctcggtgaactccatgctatcctgagaaggcaggaagacttttatccatttttgaaggacaatagggagaaaatcgaaaaaatcctgacattcagaatcccatactacgttggtcctctggcaagaggtaacagtaggttcgcatggatgacaaggaaaagcgaggagacaatcacaccctggaattttgaggaagttgttgacaagggtgccagcgcacaatcctttatcgaaagaatgacaaatttcgacaagaatctgcctaacgaaaaggttctcccaaagcattcactcctgtacgaatattttacagtttataacgaactgactaaagttaaatacgttaccgagggtatgaggaagccagcattcctttccggggaacagaagaaagctattgtggacctcctgttcaagacaaatagaaaagtgacagttaagcaactcaaagaggattacttcaaaaagatcgaatgttttgactctgtggagatcagcggggtggaggatagattcaacgccagcctgggtacatatcatgatctcctgaaaatcattaaagacaaggacttccttgacaacgaggagaacgaggacattctggaagacattgttctgaccctcacactctttgaggatagggagatgattgaggaaagactgaagacctacgcccacctctttgacgataaagtgatgaaacagctcaagagaagaaggtatacaggttgggggagactgagcaggaagttgatcaatgggattagggacaaacagtccgggaaaacaatcctcgattttctgaagtcagacggtttcgcaaacagaaattttatgcagctcattcacgatgacagcttgacattcaaggaagacatccaaaaggctcaagtgagcggccaaggggatagcctccacgagcatattgcaaatctggcaggttcaccagccatcaaaaagggcatacttcagacagttaaggttgtggacgaattggttaaagttatgggcaggcataagccagagaatatcgttatcgaaatggcaagggagaaccaaacaactcaaaaagggcagaaaaatagcagagagaggatgaaaagaatcgaggaagggatcaaggaacttgggtcccaaatcctcaaggagcacccagttgaaaatactcaactgcaaaacgagaagctctatctctactatctccaaaacgggagggatatgtatgttgaccaggagctggatattaacagactgtcagattatgatgttgatcatatcgtgccccagtcattcctgaaggacgattccatcgacaacaaagttctcacaaggtccgataaaaacaggggcaagtccgataacgttccaagcgaagaagtggtgaaaaagatgaaaaactattggagacaacttctgaatgcaaagttgattactcagagaaagtttgacaacctcacaaaagcagaaagaggcgggcttagcgaactcgataaggcagggtttatcaaaagacagctggttgagacaaggcagatcacaaaacatgtggcacagatccttgactcaaggatgaataccaagtatgatgagaatgataagttgatcagggaggttaaagttatcacactcaaatccaaactggtgtcagacttcaggaaagactttcaattttataaggtgagggagatcaataactaccaccatgcacatgacgcctacctgaacgcagtggtgggtacagcattgattaaaaaataccctaagctggagtctgagtttgtgtacggggactacaaggtgtacgacgtgaggaaaatgatagccaagtccgagcaggagatcgggaaagcaacagctaagtatttcttttacagtaatatcatgaatttctttaaaactgagattactctggcaaacggggagatcaggaaaagacccctcatcgagactaatggtgaaacaggtgagatcgtttgggacaaggggagggattttgctactgttagaaaagttctgagtatgccacaagtgaatattgtgaaaaagacagaagttcagacaggtgggttctccaaagaatccatcctgcccaagagaaattcagacaagctcatcgcaagaaagaaggactgggaccctaagaagtacggaggatttgacagccccaccgtggcctattccgtgcttgttgtggcaaaggtggagaaagggaagagcaaaaaactgaaatccgtgaaagaactgctgggaattaccatcatggaaagaagctcctttgagaagaacccaatcgacttcctggaagcaaaaggatataaggaagtgaaaaaggacctcattatcaagctcccaaaatactcacttttcgagttggagaacggtagaaagaggatgctggcaagcgcaggggaacttcagaaaggcaatgagctggcattgccatcaaagtatgtgaacttcctctacttggccagccattacgagaaacttaaaggtagcccagaagataacgagcaaaaacagctctttgtggaacagcataagcattatctggatgagatcatagaacaaatctcagagttttccaagagagttatcctcgcagatgcaaacctggataaggttctctcagcctataataagcatagagacaagccaattagagagcaagcagagaacattatccacttgttcactcttacaaacctgggggcaccagccgccttcaaatatttcgatacaacaatagacagaaagaggtataccagcaccaaagaagttctcgacgccacactgatccatcaatcaatcacaggcctttacgaaactaggatcgacttgtcacaactgggtggggat

SEQ ID NO: 64 - DNA, 3307 bp, Unknown
  Cas9
gagcaaggacacctacgacgacgacttggacaacctattggcccagataggtgaccagtatgcagacctcttccttgcggccaagaacttgagtgacgctatactgctcagtgacatcctgagggtgaacactgagatcactaaggcccctctctctgcctcaatgattaagcgttacgacgagcatcaccaggatctcaccctgcttaaggcccttgttcggcagcagctccctgagaagtacaaggagatattttttgaccagtctaagaacggctacgccggttacattgacggtggggcaagccaggaggagttctacaagttcatcaagccgatccttgagaagatggacggcaccgaggagctacttgtcaagttgaaccgggaagacctgctccggaaacagcgtacattcgacaacggcagcatccctcaccagatccacctgggcgaactacacgccatcctccgacgtcaggaggacttctatccattcttgaaagataacagggaaaaaatcgaaaaaatacttacgtttcgaataccttactacgtggggccccttgctcggggaaactccagattcgcatggatgaccaggaagtcagaggagaccatcacaccctggaactttgaggaggtggttgacaaaggtgcttctgcccagtccttcattgagcggatgactaacttcgacaagaacctgcccaacgagaaggtgctgccaaagcacagcctgctctacgaatactttactgtgtacaatgagctgacgaaggtgaagtacgtgacagaggggatgcggaagcccgctttcctgagcggcgagcaaaaaaaagcaatcgtggacctactgttcaagaccaaccgaaaggtgacagtgaagcagctcaaggaggactacttcaaaaaaatcgagtgcttcgactctgttgagataagcggcgtggaggaccgattcaacgcctcattgggaacctatcacgacctgctcaagatcattaaggacaaggacttcctggataatgaggagaatgaggacatcctggaggatattgtgctgacccttactctattcgaggacagggagatgatcgaggagcgactcaagacctacgctcacctgttcgacgacaaggttatgaagcaattgaagcgtaggcgatacacggggtggggaagactctcccgaaaactgataaacggcatcagggacaagcagtcagggaagacgatcttggacttcctgaaatccgacgggttcgccaaccgcaacttcatgcagctcattcacgacgactcactaacgttcaaagaggacattcagaaggctcaagtcagtggacaaggcgactccctgcacgagcacattgcaaaccttgcgggctccccggcgattaaaaagggcattctccaaacggttaaggtggtggacgagctggtgaaggtgatgggccgacacaagcctgagaacatcgtgatcgagatggccagggagaaccagactacccagaagggtcagaagaactctcgggaacgtatgaagcgtattgaggaggggattaaggagttgggctctcaaatcctcaaggagcaccctgtggagaacactcagctccaaaacgagaagctgtacctgtactacctgcaaaacgggcgcgatatgtacgtggatcaggagttggacatcaacaggcttagcgattacgacgtggaccacatcgtgccacagtcattcttaaaggacgacagcatcgacaacaaggttctgacgaggagcgacaagaatcgagggaaaagtgacaatgttccatccgaggaggtggtcaagaaaatgaagaactattggcgtcagcttctgaacgccaagctcatcacccagcggaaattcgacaacctgactaaggctgagcgaggcggactctccgagcttgacaaggctggcttcatcaagcggcagttggtcgaaacccgacagataacgaagcacgttgcccagatacttgactcccgtatgaacaccaagtacgacgagaacgacaagctcatcagggaggtgaaggtcattacccttaagtccaaactcgtcagcgactttcgtaaggacttccagttctacaaggtgcgcgagatcaataactaccaccacgcacacgacgcctacctgaacgcagtggttggaaccgcgttgattaaaaagtaccccaagttggagtcggagttcgtttacggggactacaaggtgtacgacgttcggaagatgatcgccaagtctgaacaggagatcgggaaagcaaccgccaagtatttcttctatagcaacatcatgaacttctttaaaaccgagatcacacttgccaatggcgagatccgtaagaggccgctgatcgagacaaatggggagactggcgagatcgtgtgggacaagggccgcgacttcgcaaccgttcggaaagtcttgtccatgcctcaagtcaacatcgtcaagaagactgaggtgcaaacaggcgggttctcgaaggagtccatactgcccaagaggaactcagacaagctcatagcacgcaaaaaagactgggatccaaagaaatacggcgggttcgactcgccgacagtcgcatactccgtgttagtggtggctaaagtggaaaaggggaagtccaagaagctcaagtccgtcaaggagttgctcgggatcaccattatggaacggtcctcattcgagaagaatcccattgacttcctagaggcgaagggctacaaagaggtcaaaaaggacctaattattaagctccccaagtattcactcttcgaacttgaaaatggtcgtaagcggatgttggcaagcgctggagagcttcagaaggggaacgagcttgcactgccttccaagtacgtgaacttcctgtacctcgcctctcattacgagaagttgaagggctcaccggaggacaacgagcagaagcagttgttcgtggagcagcacaagcactacctcgacgagatcattgagcagataagtgagttcagcaaacgggtgatccttgccgacgctaacctggacaaggtgctgagcgcctacaacaagcacagagacaagccgatccgagagcaagcggagaacatcatacacctgttcaccctcacgaacctcggggctcccgcagccttcaaatattttgacacgaccatcgaccgtaaacgctacactagcacgaaggaggtgctggacgctacccttatccaccagtccatcaccggcctgtacgagacgagaatcgacttgtcgcagctcggtggtgac

SEQ ID NO: 65 - DNA, 4101 bp, Unknown
  Cas9
gacaaaaaatactcaattggtctggcaattgggaccaacagtgtcggatgggccgtgattaccgacgagtacaaggtgccgtccaaaaaattcaaggtgcttgggaacaccgaccgccactcgatcaagaaaaacctaatcggtgcgttgcttttcgacagtggggagaccgccgaggcaacacgcttaaaacgcacagctaggaggagatatacacggcgcaagaaccgaatatgctacttacaggagatattctccaatgagatggcgaaggtggacgactctttcttccatcggcttgaggaatccttcctggtcgaggaggacaagaagcacgagcgacacccgatattcgggaacatcgttgatgaggtggcgtaccacgagaagtacccaacgatataccacttacgcaagaagctcgtggactctacggacaaggccgacttgcgccttatctacttggcactggcccacatgattaagttccgaggccacttccttatcgagggtgacctgaaccccgataactccgacgtggacaagctcttcatccaactcgtccagacatacaaccagctattcgaggagaatcctatcaacgcctctggggtggacgctaaagctatcctctcagcccgcctgtcaaagtcgaggaggttggagaacctaatcgcccagcttccaggcgagaagaaaaatgggctgttcggaaaccttatcgcactctcactgggcctaaccccgaacttcaagtccaacttcgacctggcagaggacgcgaaattgcagttgtcgaaagacacctatgacgatgacctggacaacctgttggcccagataggggaccagtacgccgacctgttcctagcggccaagaacctgtccgacgccatcttgctgtcggatatactgcgggtgaacaccgagatcactaaagcacctctctccgccagcatgattaagcgttacgacgagcaccaccaagatttgaccctgctaaaggcacttgtacggcagcagcttcccgagaagtacaaggagatctttttcgaccaaagcaagaacggctacgccgggtacatcgacggaggtgccagccaggaggagttctacaagttcattaagcccatcctggagaagatggacgggactgaggaactacttgtgaagctgaaccgggaagacttactacggaagcagcgtaccttcgacaacggttctatcccacatcagatccatcttggggagttgcacgcgatcctgcgacgccaggaggacttttaccccttcctgaaagacaaccgcgagaaaatcgagaagatactgaccttcagaataccttactacgtcggaccccttgcgcgaggcaactcaagattcgcgtggatgaccaggaaatcagaggagaccatcacaccctggaatttcgaggaggtggttgacaagggtgcctccgcccagtcctttatcgaacgaatgaccaacttcgacaagaacttgcccaacgagaaggtgctccccaaacacagcctcctctacgaatatttcacagtgtacaacgagcttactaaagttaagtatgttactgagggcatgaggaaacccgccttcctgtcaggcgagcagaagaaagctattgtggacctccttttcaagaccaaccggaaggtgacagtgaagcagctcaaggaggactacttcaagaagatagagtgcttcgacagcgtggagatcagcggggtggaggacagattcaatgcctctctcggaacataccacgacttgcttaagatcatcaaggacaaggacttcctcgacaacgaggaaaacgaggatattctggaggatattgttctgactcttaccctgttcgaggaccgggagatgatcgaggagcgtctcaagacctacgcccacctgttcgacgacaaagttatgaagcagctcaagcgtcggagatataccggatggggccgtctgtctcggaagctcatcaacgggatcagggacaagcagtcagggaagacgatcttagacttccttaagtctgacggcttcgccaacaggaacttcatgcagttgatccacgacgacagccttaccttcaaggaggacatccagaaggcccaagtgagtggccagggtgacagcctccacgagcatattgctaatcttgcgggttccccagcgattaaaaagggcatacttcaaaccgttaaggtggtggacgagcttgtcaaggtgatggggcgacacaagcccgagaacatcgtgatcgagatggccagggagaaccagaccacccagaaggggcagaagaatagccgagaacgcatgaagcgcatcgaggaggggattaaggagctagggagccagatcctcaaggaacatcccgtcgagaacacccagctccagaacgagaagctatacctctactacttgcaaaacgggagggatatgtacgtggatcaggagttggacattaaccgcctaagcgactacgacgtagatcacatcgtgcctcagtcattcctcaaagacgacagcattgacaacaaagtcttgacccgatccgacaagaaccgaggaaaatccgacaatgtgccctcagaggaggtcgtcaagaaaatgaagaactattggaggcagctacttaacgccaaactcataacccagcggaagttcgacaacctgacaaaggctgagcggggtgggctcagcgagcttgacaaggctggcttcatcaagcggcagttggtggagacaagacagataacgaagcacgtggctcagatcctggactctcgcatgaacacgaagtacgacgagaacgacaaattgatccgcgaggtcaaggttattacgctcaagagcaaacttgtcagcgatttccgcaaggacttccagttctacaaggtgagggagattaacaactaccaccatgcacatgatgcctacttgaacgcagtggtggggaccgcgcttattaaaaagtaccctaagttggagtcagagttcgtttatggggactacaaggtgtacgacgtccggaagatgattgcaaagtctgaacaggaaatcgggaaggccaccgccaaatatttcttctacagtaacattatgaatttttttaagactgaaattactctcgcaaacggcgagatcaggaagcgtcccctcatcgagacaaacggggagaccggggagatagtctgggacaaggggcgggacttcgctacggtgaggaaggtgctctcgatgccacaagtgaacatcgtcaaaaagacagaggtgcagaccggtggcttctcaaaggagtcaatcctgccaaaacgtaacagcgacaagctcatcgcccgcaagaaagactgggaccctaagaagtatggtgggttcgactcaccgacggtcgcatactccgttctggtcgtggcaaaggtggaaaagggcaagtccaaaaaactgaaatccgtgaaggagttgcttggcattaccatcatggaacgcagcagcttcgagaagaaccccattgacttcctggaggctaaagggtacaaggaggtcaagaaagatttaattattaagctacctaagtacagcttgttcgagctggagaacggccgaaaacgaatgctcgcatccgccggggaacttcaaaagggcaacgagcttgcgctgccctccaagtacgtgaacttcctgtacttggcatcccactacgagaaactcaagggtagcccagaggacaacgagcagaagcagctattcgtggagcagcacaagcactacctcgacgagataatcgagcagatcagtgagttcagtaagcgggtgatactcgcggacgccaacttggacaaggtgcttagtgcctacaacaagcaccgtgacaagcccatccgagaacaggctgagaacatcatccaccttttcactctgacaaacctcggtgctcccgccgccttcaaatacttcgacactaccatcgacaggaagcgctacacatctacgaaggaagttcttgacgctacgcttattcatcagtctatcacagggctgtacgagacaaggatcgaccttagccaactcggcggggat

SEQ ID NO: 66 - DNA, 2360 bp, Brassica juncea
atgaagcatctttggctcacattagcttttctattggctttggcaacttgcaaagctgatgaagaaattacttgcgaagagaacctgccattcacatgtggtcaaactgatcgtttcaacagtagcagtttcgagaaagacttcatcttcggtcttgcatcttctgcttaccaggcatgtaacatatatatcaaccattagtattatgttgccagacgtcatattttacgtataaaacatcatatataaacattaaaatccaacgttgcatggttgtttcttttcatttcagatcgaaggtagcataaatcgtggagttaacgtttgggatggcttcactcaccgattcccacgtttgtttttttgcatggttactcatcacatatacatattatgtcggttatatgtctccatgcacttatagttatgtatttatttactatcagataaagcaggacccgatcatggaaatggagacactacttgtaactcatattcgtactgggaggtaattaaattcctcaatatatatgtgtgtgcatattaatattactcactgaattatttatcgactaccaacctagtgcggattgacatgcgattatatgtgaactgcagaaagatatagaggtgatggatgaactcaaagctactggctacagattctccattgcctggtcaagaatcattccaagtatgtgaacgttattgatccatgtatatatataaatcgtatatggtaatattcgattatgattctttcgaaagattaaatataggatacatatgagcaggaggaaagaggagcaggggagtacaccaaggaggtattaactactaccacggactcataaatggcctcatcgaaaagggtataacgcctttagttacgctctttcactgggaccttcctcaagtactacaagatgaatatgaaggtttattggaccctcagatcatgtatgatatatttatgccatgctgcttattaagaaagacgacaatatataaagatttgttcttggattaatgaaatgactataatattcgcagagatgatttcagagatttcgcggatctatgttttgaagaatatggtgataaagtaaagcactggttcacaatcaaccagctctactcagtgcctacgagaggctatggattaggatcagatgcacctggtcgatgttctccaaaggttgattctacatgttacgccggaaattcttcaacggaaccctatattgttgcacataaccagctccttgctcatgccacggtggtcgatctttacaggacaaaatataaggcaggttctccattttatgaaaggtgtattatctgattctaaattaatcatatcgatgggtatatatatctgcgtgaccacagcatcaaggaggtaagattggacctgtgatgataactagatggtttcttccatataatgacactgatccagactccatagctgcaaccgagaggatgaaagaattcttcttgagatggtatatgttttataaaatgaaatgatattcttaacatgaatatatgctgtatatatgaactgacgaaaaatatgtatatatatgtacaccaggtacatggggccgctaacaaatggtacataccctcaaatcatgatagacactgtgggtgagcggctaccatcgttcactccagaggaatccaaactcgtaaagggttcatatgattttcttggtctcaactattacttcactcagtatgtccagccaagtcctaatcatgttgattcggatggtcacactgccatgatggacgctggcacaaggctcacatgtatccatctatatatttcgacttagttacaaccttaatttatatctacctaacgccttttgttaattacaataatttgtgttaacagatcgtaatgcaagtaatcatgccattggcccagtggtatatatatatatatgcatcatccatccctattctttcattcttttttctaagcaaaattcagttttctgatactaatttgcttccctttctaagttcactgaacacaaagatgacgagaccaaaaacacctattactacccaaaaggcatttattatgtgatggatcacttcaaaaccaattacaatgaccctgtaatctatataaccgagaacggtgggttctactactcatctctaaattcatctttacatgttaaatgtaatttgaaatttgttgaaattgttcatgttatgacggttaactaggattcagtacctccggtgatgaaacccgtgaggaggctaagtttgattacaggcggattgattatctctgcagtcatctctgtttcctcagtaaagtcatcaagtga

SEQ ID NO: 67 - DNA, 2379 bp, Brassica juncea
atgaagcttcttcatggactcgctttagtttttctattagctgctgcgagttgcaaagctgatgaagaaattacttgcgaagagaacaatccattcacatgtagtaacactgatattttaagcagtaaaaacttcggaaaagacttcatcttcggtgttgcatcttctgcttaccaggcatgtaacaaatttttttgacgtataaataaatacaattcaaaaatactaaaatgcaacttcgcatggttgtttcttttcatttcagatcgaaggaggaagaggtcgtggtgttaacatttgggatggcttcagtcaccgatatccaggtacgtcacagtgtatatatacacatgagatgaacgtcggtttatatgtacacatattaatgtatttgtaactactatcagagaaatcagggtcagatttgaagaatggagacactacttgtgagtcatatacgagatggcaggttaatacattgatactcatatgactgaactatatatgtataaaaactatacgtgtggattgacatgtgattaaaatatgtaaaccgcagaaagatgtagacgtgatgggcgaactcaatgctactggctacaggttctcctttgcgtggtcaagaatcattccaagtatgtacatgttatcgattcgtttgtattttaattgggatcatttagttgagaaaagtactaattaatgtacgacatatatatacatgagcagaaggaaaggtgagtaggggagtgaaccaaggaggtcttgattactaccacaaactcatagatgcactactcgaaaagaatataacgcctttcgttaccctctttcactgggaccttcctcaaacactccaagatgagtatgaaggtttcttagaccgccagatcatgtatgtttatatttgttccatgcttcttatattataaataagagaagaaaacgttttggttttagttacatgcattaatgaaatgattctgtataatatgcacagacaagatttcaaagactacgcggatctatgtttcaaagaatttggtggaaaggtaaagcactggatcacgatcaaccagctatacacagtccctacgagaggctatgcggtcggaacagatgcacccggtcgatgttctcctatggttgataccaagcacaggtgttacggtggaaattcttcaacagaaccctacatcgttgcacataaccagcttcttgctcatgccacggtcgtcgatctttacaggaccaaatataaggtgagtggtctctccatattaaggtggtgcaaatctaacatatctgattctaatgtatagtcatatatatatatatatcacgtgaccaacagtttcaaaaagggaagattggacctgtgatgataacaagatggtttcttccatttgatgagtctgatcctgcctccatagaagcagctgagaggatgaaccaattctttcatggatggtatatatatatattacagaacaatgtaacagtatatagtgtatgtatgtataattaaaagatatacatggatcaggtacatggagccgctaacaaagggtagatacccagacatcatgaggcagattgtgggtagtaggcttcccaactttaccgaggaagaagcccaactcgttgccggttcatatgattttcttggtctcaactattacgtcactcagtacgcccagccaaaacctaacccatatccttcagagacacacactgccatgatggacgctggcgtaaagctcacatgtactagtctattaccactaattagatacagcctttctatacatataaatattcttttatctcctttttgttgcaacatactttgtgagtgaccatctgttatttcatccttgtgtttacagatgataactcacgtggtgaatttcttggtccactggtatatatcaatgatccaccccctaagatttgtttttctttcattttttcagttttcagtataacaaccctaattatgttttttaattgatgtgtatatttatttacttccattttcacagttcgttgaagacaaggtaaacggcaacagctattactacccaaaaggcatttactacgtaatggactacttcaaaaccaaatacggagaccctttaatctatgtcaccgagaacggtgagttttacgaactcttttcatttataccacataataattattgtattttgatattagtcgaagaaactgactttattgtggaatatttttaatgtggcggtttatttaggatttagtacccccagtgaagaaaaccgtgagcaggctattgccgattacaagcgaattgattatctctgcagtcatttatgttttctccgcaaggtcatcaagtga

SEQ ID NO: 68 - DNA, 2414 bp, Brassica juncea
atgaagcttcttcatggactcgctttagtttttctattagctgctgcgagttgcaaagctgatgaagaaattacttgcgaagagaacaacccattcacatgtagtaacactgatattttaagcagtaagaacttcggaaaagatttcatcttcggtgttgcatcttctgcttaccaggcatgtagcaaatgttgtcacaccataattttgaaataaaatttaaaacactaaaatgcaactttgcatggttgtttcttttcatttcagattgaaggagggagaggtcgtggtgttaacgtttgggatggcttcagtcaccgatacccaggtatgtcatttgcacagcgacatctatatttatatgtgagaggaatgttggttacatatactcatatagtcatattaatgtatttgtaactactatcagagaaatcagggtcagacttgaagaatggagacactacttgtgagtcctatacgagatggcaggttaatacattgatactcgtatgattgaactatatatgtataaaaactatacgtgtggaattgacatgtgattaaaatatgtaaactgcagaaagatgtagacgtgatgggcgaactcaatgctactggctacaggttctcctttgcgtggtcaagaatcattccaagtatgtacatgttatccattcgtttgtattttaattgggatcatttagttgaaaaagtactaattaatgtacgacatatatatacatgagcagaaggaaaggtgagtaggggagtgaaccaaggaggtcttgattactaccacaaactcttagatgcactcctcgaaaagaatataacgcctttcgttaccctctttcactgggaccttcctcaaacactccaagatgagtatgaaggtttcttggaccgccagatcatgtatgtgccatgcagacatattatatatgaatttaagagattgattataaaattattaataaaaaagaagaaggtttggtcttatttaattacatgtattaactgaaataattatatattcatatgcagacaagatttcaaagattacgcggatctatgtttcaaagaatttggtggaaaggtaaagcactggatcacgatcaaccagatatacacagtccctacgagaggctatgcggtcggaacagatgcacccggtcgatgttctcctatggttgataccaagcacaggtgttacggtggaaattcttcaacagaaccctacatcgttgcacataaccagcttcttgctcatgccacggtcgtcgatctttacaggaccaaatacaaggtgagttgtctcaatacgtgataaagatggtgtagtgtaatctaagatatctgattctaacttagtcatatatcacgtaaccaacagttccaaaaagggaagattggacctgtaatgattacaagatggtttcttccatttgatgagtctgatcctgcctccatagaagcagctgagaggatgaaccaattcttccatggatggtatatatatatatttatattaccaaaaatgtatcagtataaattgtatatatgtataatgaaaagatatacatggatcaggtacatggagccgctaacaaagggtagatacccagacatcatgaggcagattgtgggtagtaggcttcccaacttcaccgaggaagaagcagaactcgttgctggttcatatgattttcttggtctaaactattacgtcacccaatacgcccagccaaaacctaacccatatccttcagagacacacactgccatgatggacgctggcgtaaagctcacatgtacttttctattaccacttagttacaaccttttgatatatataaatgttttatctcctttttgtgagtgaccatcagttatttcattcttgtggttacagatgataattcacgtggtgaatttcttggtccactggtataatatgaatgatccacccctatgatttctaattcattttattttttcaattttcaatataagcaccactaattaggttttcttgattgatatgtatacgcttaactcccgtttctcagtttgttgaagacaaagtaaacggcaacagctattactacccaaaaggcatttattacgttatggactacttcaaaaccaaatacggcgaccctttaatctatgtcaccgaaaatggtgagttctacatgcatatattttcatctataacatctactataatttgtgtatttcgaaataaatccaagaaactgactttcaaatattgtgtactttttcatgttatgtcggtttaattaggatttagtacccccagttcagaaaaccgtgagcaagctattgccgactacaagcgaatcgattatctatgcagccatctatgttttctccgcaaggtgatcaagtga

SEQ ID NO: 69 - DNA, 2414 bp, Brassica juncea; identical to SEQ ID NO: 68

SEQ ID NO: 70 - DNA, 2484 bp, Brassica juncea
atgaagcttcttgggctcgctttagtttttctgttagcttctgcgagttgcaaagctgacgaagaaattacttgtgaagagaacaatccattcacatgtagtaacactgatattttaagcagtaaaaacttcggaaaagacttcatcttcggtgttgcatcttctgcttaccaggcatgtaacaaatgttgacataccatactttttgacgtatagaaaacactattcaaaaatgataatatctaactttgcatggttgtttcttttcatttcagatcgaaggagggagaggtcgtggtgttaacatttgggatggcttcagtcaccgatacccaggtatgtcgtttgcacggtgacatctatatatatcatatatgacaggaatgttggttataagtactcatattaatgtatttgtaattactatcagagaaatcagggtcagatttgaagaatggagacactacttgtgagtcatatacgagatggcaggttaattcttcagtacatttctagatactcatgactgaactatgtatacaaactacgtgccgattgagatgcaatcaaaatatgaaactgcagaaagatgtagacgttatgggcgaactaaatgctactggctacagattttcctttgcgtggtcgagaatcattccaagtacgtacagattatcgatcagtacatgtatatatatagttggacgtgttttaaatgtacgatttatatatacatgagcagaaggaaaggtgagtaggggagtgaaccaaggaggtcttgattactaccacaaactcatagacgccctcctcgaaaagaatataactcctttcgttaccctctttcactgggaccttcctcaaacactccaagatgagtacgaaggtttcttggaccgccagatcatgtatgtttatatttgtgacatgcttcttatattattaataagagaagaaaaagatggttaattttagttacatgcattactgaaatgattctatattaatatgcacagacaagatttcaaagattatgccgatctatgtttcaaagaatttggtggaaaggtaaagcactggatcacgatcaaccagctatacacagtccctacgagaggctatgcagtcggaacagatgcacccggtcgatgttctcctatggttgatactaagcacaggtgttacggcggaaattcttcaacagaaccctatatcgttgcacataaccagcttcttgctcatgccacggtcgtcgatctttacaggaccaaatataaggtgaatgctgtctccatatgtgaaaattaaggtggtgtctaacatatctgattctaatgtaaatatcacgtgaccaacagttccaaaaagggaagattggacctgtgatgataacaagatggtttcttccatttgatgagtctgatccggcctccatagaagcagctgagaggatgaaccaattcttccatggatggtatatatatatattaccaaaaatgtaacagtatctactgtatttgtatgtatgtataatggaaaaatatacatggatcaggtacatggagccgctaacaaagggtagatacccagacatcatgaggcagattgtgggtagtaggcttcccaactttaccgaggaagaagccaaactcgttgccggttcatatgattttcttggtctcaactattacgtcactcagtacgcccagccaaaacctaacccatatccttcagagacacacactgccatgatggacgctggtgtaaagctcacatgtaagtaccacacaatattactacttagttacgacctttctatatattttttttcttctttttgttaacatactttgtgagagtatcaattatttcatccttgtgtttacagatgataattcgcgtggtgaatttcttggtccactggtatatatgaatgaaccacccctatgatatctctttcattttttattctatttgcaatatatagaacaccactgattatgttctcgtgattgatatgtatatttgtttgcttcccttgctcagttcgttgaagacaaagataacggaaacagctattactatccaaaaggaatttattacgtgatggactacttcaaaaccaactacggcaaccctttaatctatgtcaccgagaacggtgagttctacatactactactcctctattttcatttataccacgcataatattatgtaaccacaaaagtagacccatattcaatctaccgcagggtgaatagtaatgaaaataattgtaaaagttattttacaattattgtattttcgaaattggtccaagaaactaacttacaaatattgtgtaatatttttcatgcaatggcggcttaattaggatttagtacgcccagttcagaaaaccgtgagcaggctattgcggattacaagcgaattgattatctctgcagtcatctatgttttctccgtaaggtcatcaagtaa

SEQ ID NO: 71 - DNA, 2502 bp, Brassica juncea
atgaagcttcttcatggacttgctttagttttcctattagctgcttcgagttgcaaagctgatgaagaaattacatgtgaagagaacactccattcacatgtggtaacactgatattttaagcagtaaaaactttggaaaagacttcatcttcggtgttgcatcttctgcttaccaggcatgtaacaaatgttgacataccatactataaataaatacaattcaaagagctaatttccaactttgcatggttgtttattttcctttcagatcgaaggagggagaggtcgtggtgttaacatttgggatggcttcagtcaccgatacccaggtatgtcgtttttgcacggtgacgtacgtgtgtatatatatatatatatataatgtacacatattaaagcatttgtaattactatcagagaaatcagggtcagatttgatgaatggagacactacttgtgagtcatatacgagatggcaggtcagtacattgatactcacatgactgaactatgtataaaaaaacctatacgtgtgattgttgacatgccattaaaatatgtaaactgcagaaagatgtagacattatgggagaactcaatgctactggctacagattctcctttgcgtggtcaagaatcattccaagtatgtacatattattgattgttcgtaattgggatcgtttagttggaaaagtactgattaatgttttggcaaaaaaaaaagtactgattaatgtacaatatatatatgtatgcacgagcagaaggaaaagtgagtaggggagtgaaccaaggaggtcttgattactaccaccaactcatagacgccctcctagaaaagaatataacgcctttcgttaccctcttccactgggaccttcctcaaacactccaagatgagtatgaaggtttcttagaccgccagatcatgtatgtttatatttatgccatgcttcttatattattaataaaagacgaaaaagatttggttttagtaacatgcattactgaaatgattatacaataatatgcacagacaagatttcaaagattacgcggatctatgtttcaatgaatttggtggaaaggtaaagcactggatcacgatcaaccagctatatacagtgccgacaagaggctatgcgagcggaacagatgcacccggtcgatgttcttatatggttgataccaagcacaggtgttacggcggaaattcttcaacagaaccctacatcgttgcacataaccagcttcttgctcatgccgcagttgtcgatctttacaggaccaaatataaggtgagtggtgctccatatgtgaaaattagggtggtgtaaatctaacatatatctgattctaatgtatagtcatatatatgtatcacgtgaccaacagttccaaaacgggaagattggacctgtgatgataacaagatggtttcttccatttgatgagtctgatcctgcttgcgtagaagcagctgagaggatgaaccaatttttccatggatggtatttatatatatatatatatatatatatatgtgtgtgtgtgtattaccaacaatgtatcagtatgtattttatgtatttataatgaaacaaaaatatacatggatgatggatcaggtacatggagccgctaacaaagggtagatacccagacatcatgaggcagatcgtgggtagtaggctccccaactttaccgaggaagaagccgcactcgttgctggttcatatgattttcttggtctcaactattacgtcactcagtacgcccagccacaacctaacccatatccttcagagacacacactgccatgatggaccctggtgtaaagctcacatgtacgtacttcagtaatattaccacttagtacttatcaaaaaaaaaaaaaattaccacttagttacaacctttctatatatgtttttctccttttgttaacatactttgtgagtgactatcaattatttcatccttgtgtttacagataataattcacgtggtgaattacttggtccactggtaatatatgaatgatccacctctacgatttctcttttttttaatcaatattttctatttgcaatagaacaccactgattatgttctcttgattgatatgtatattttgtttggttccctttctcagttcgctgaagacaaggttaacggcaacagctattactacccaaaaggaatgtattacgtaatggacttcttcaaaaccaattacagcaaccctttaatatatatcaccgagaacggtgagttctacatactacttactactcatctattctacataaattaactagtgtattttatatattagtccaggaaactgactttcaaatatcgtggaatgttttcatggtttaattaggaattagttcgcccggtacagaaaaccgttgcgaagctattgccgattacaagcgaatcgattatctctgcagtcatctctgttttctccgtaaggtcatcaggtaa

SEQ ID NO: 72 - DNA, 2431 bp, Brassica juncea
atgaagcttcttcatggactcgctttagtttttctattagctactacgagttgcaaagcagatgaagaaattacttgcgaagagaacaatccattcacctgtagtaacactgatatattaagcagtaagaacttcggaaaaaatttcatcttcggtgttgcatcttctgcttaccaggcatgtagcaaatgttgtcataccccacttttgaaataaattttaaagcactaaaatgcaactttgcatggttgttcttcttatttagatagaaggagggagaggtcgtggtgttaacgtttgggatggcttcagtcaccggtacccaggtatgtggtttgcacggtgacatatatatttatatgcgagaggaatgttggttacatatacacatattaatgtatttgtaactaaaatcagagaaagctgggtcagatttgaagaatggagacactacttgtgagtcatatacgagatggcaggttaatttctcagtacattaataatcatgactgaactatatatgtataaaaactatacgtgtggattgacatgagactaaaattaatatgtaaactgcagaaagatgtagacgtgatgggcgaaatcaatgctactggctacagattctcctttgcatggtcaagaatcattccaagtatgtacatattaacgatcaatgtatatatatctttgtattttaattgggataatttagttggaaaggtactaattaatgtacgatatatatctacccgagcagaaggaaaggtgagtaggggagtgaaccaaggaggtcttcaatactaccacaaactcatagatgcactcctggaaaagaatataacgcctttcgttaccctctatcactgggaccttcctcaaacactccaagatgagtatgaaggtttcttggaccgccagatcatgtatgttccatgcttcttaattatatttgaagagagtcaatattattagtgatagaagaagatttagtctcaattacatgtattactgaaatatttctatactaatatgcacagccaagatttcaaagattacgcggatctatgtttcaaagaatttggtggaaaggtaaagcactggatcacaatcaaccagctatacacagtgcctacgagaggctatgcactcggaacagatgcacccggtcgatgttcttatatggttgataacaagcacaggtgttatggcggaaattcttcaacagaaccctatatcgttgcacataaccagcttcttgctcatgccacgatcgtcgatctttacaggaccaaatataaggtgagtgatctccctatgtgaaaaggtggtctaaatcaaacatatccgattctaatgaatagtcatatatatatatatatatatcacgtgatgagcagttccaaaaagggaagattggacctgtgatgataactagatggtttcttccatatgatgagtctgatccttcttgcgtagaagcagctgagaggatgaaccaattcttccatggatggtatatataattttttatatagccaaaatatatcagtatgtattttatgcatttataatgatacaaaaatatacatggatgatggatcaggtacatggagccgctaacaaagggtagatacccagacatcatgaggcagattgtgggtagtaggctccccaacttcactgaagctgaagccgaactcgttgctggttcatatgattttcttggtctcaactattacgtcactcagtatgcccagccgaaacctaacccatatccttcagagacacacactgccttgatggacgctggcgtaaagctcacatgtacgtactacagtattaccacttagttacaacctttctatatatctttttctcctatttgttaacatactttgtgagtgactatcaatttatttcattcttgtgtttacagatgataattcacgtggtgaattccttggtccactggtatattaatgatccacccctatgatttctcttttatttttttctattttcaatataacaccacttatgctctctttattgacatgtatatgtgttcgcttccctttcccagttcattgaagacaaagacaacggcaacagctattactacccaaaagggatttattacgtaatggactacttcaaaaccaaatacggtgacccattaatctatgtcaccgagaatggtgagttctacatactactactcatctttttcatctataacgtatactaaataatgtatttcggaataaatcccagaaactgactttcaaatattgtgtacctttgcatgttatggcggttaggatttagcacgcccactacagaaaaccgtggcgaagctattgccgattacaagcgaattgattatctttgcagtcatctatgttttctccgtaaggtcatcaagtga

SEQ ID NO: 73 - DNA, 2440 bp, Brassica juncea
atgaagcttcttcgtcgactcgctttagtttttctattagctgctgcgagttgcaaggctgatgaagaaattacttgcgaagagaacaatccatttacttgtagtaacactgatattttaagcagcaagaacttcggaaaagatttcatctttggtgttgcgtcttctgcttaccaggcatgtagcaaatgttgtcacaccctaattttgaaataaaattcaaagcaccaatatccaattttgcatagttgtttcttttcatttcagattgaaggagggagaggtcgtggtgttaatgtttgggatggtttcagtcaccggtacccaggtatgtcgttcgcacggtgacatctaaactaataatgttggttacatatacacatattaatgtatttgtaattaatattatcagagaaagctgggtcagatttgaagaatggagacactacttgtgagtcatatacgagatggcaggttaatttctgagtacactgattctcatgactgaattatatatgtataagaactccctaaaaactatacgtgtggattgacatgaaatttaaattaattgtaaactgcagaaagatgtagacgtgatgggcgaaatcaatgctactggctacagattctcctttgcatggtcaagaatcattccaagtatgtacatattaacgatcaatgtatatatatctttgtattttaattgggataatttagttggaaaggtactaattaatgtacgatatatatctacccgagcagaaggaaaggtgagtaggggagtgaaccaaggaggtcttgattattaccaccaactcatagatgcactcctcgaaaagaatataacgcctttcgtaaccctctttcactgggaccttcctcaaacactccaagatgagtatgaaggtttcttggaccgccagatcatgtaggtgccatgcttcttaattatatttgaggagagtaaatattattagtaatagaagaagaagatttagtcttaattacatgtttactgaaatgattctatactaatatgaacagccaggatttcaaagattacgcggatctatgtttcaaagaatttggtggaaaggtaaagcattggatcacgatcaaccagctatacacagttcctacaagaggctatgcagtcggaacagatgcacccggtcgatgttctcctatggttgataccaaacacaggtgttacggcggaaattcttcaacagaaccctacatcgttgcacataaccagcttcttgctcatgccacggtcgtcgatctttacaggaccaaatataaggtgagtggtgactccatatgtgaaaattagagtggtgtaaatctgatatatatctgattctaatgtatagtcatatatttggaccaacagttccaaaacgggaagattggacctgtgatgataacaagatggtttcttccatatgatgagtctgatcctgcctgcatagaagcagctgagaggatgaaccaattcttccatggatggtatatataattttatatattatcaaaaatgtatcagtatgtattttatgtatttataatgaaacaaaaatatacatggatcaggtacatggagccgctaacgaagggtagatacccagacatcatgaggcaaattgtgggtagtaggcttcccaactttaccgaggaagaagccgcactcgttgccggttcatatgattttcttggtctcaactattatgtcactcagtacgcccggccacaacctaacccatatccttcagagacacacactgccatgatggacgctggagtaaagctcacatgtactaatttacattaccacttagttacaacctttccgtacatatatatatacacatgttctatctcctttttgttacaacatactctgtgagtggccatcaattgtttcatccttgtgtttacagatgataattcacgtggtgaaatacttggtccactggtaatatatgaatgatatccacccctatgatttctcttttatttttatttttctatctgcaatagaacaccactgattatgttctcttgattgatgtgtttgcttccctttctcagttcgctgaagacaaagttaatggcaacagctattactacccaaaaggaatttattacgtaatggactttttcaaaaccaattacagcaaccctttaatctatatcaccgagaacggtgagttctacattctacttactactcatctattctacataaaataattagtgtatttttatatatataagtccaataaactgactttcaatattgtggaatgttttcacggtttaattaggaattagttcgcccagtacagaaagccgttgtgaagctattgccgattacaagcgaattgattatctctgcagtcatctatgttttctccgtaaggtcatcaagtga

SEQ ID NO: 74 - DNA, 2426 bp, Brassica juncea
accatgaagattcttcatggactcgctttagtttttctattagctattgcgagttgcaaagcttatgaagaaattacttgcgaacagaacgaaccattcacatgtggtaacactgatatcttaagcagtaaaaacttcggagaagacttcatcttcggtgttgcatcttctgcgtaccaggcatgcaacaaatgctgccataccatatttttgacgtatagaaaataatattcaaaaatgctaacatcaaactttgcgtggttgtttccatttcagatcgaaggagggagaggtcgtggtgttaacgtttgggatggtttcagtcaccgatacccaggtatgtcacggtggcatatatatacatataagatgaatgtcgtttatatctacacacattaatgtatttgtaattactatcagagaaatcagggtcagatttgctgaatggagacacttcttgtgagtcatatacgagatggaaggttagttcctcagtacatatacactcatatgactaaactacgtataaaatttacgtgtgaactgaattccgtttaaaatgcagaaagatgtagagattatgggagaactcaatgctactggctacagattctccttagcgtggtcaagaatcattccaagtacgaacataaatttgtatttttattgggatcctttagctggaagagtatactaattaatgtatgatataaatgagcagaaggaaaggtgagtaggggagtgaaccaaggaggtcttgattactaccaccaactcatagacgccctcctcgaaaagaatataactcctttcgttaccctctttcactgggaccttcctcaaacactccaagatgagtatgaaggttttttggatcgccagatcatgtatgtgccatgcttcttaattatatacaaattattaataaaaacaagaagaagaagaagaaggttttgtcttaattacatgctttactgaaagaatgattatatattaatatgcacagacaagatttcaaagactatgcggatctatgtttcaaagaatttggtggaaaggtaaagcactggatcacgatcaaccagctattcacagtgcctacgagaggctatgcactcggaacagatgcacccggtagatgttctcctatgattgatgagaggtgttacggcggaaactcttcaacagaaccctatattgttgcacataaccagcttctcgctcatgctgcggtcgtcgatctttacaggaccaactataaggtgagtagtctccatatttaatacgatggtgtgatcttaatccatctgattctgatctagtcatatatatcatgtgaccaacaggaccaacaagggaagattggacctgtgatgataacaagatggtttcttccatatgatgagtctgatcccgcttgcgtagaagcagctgagaggatgaaccaattcttccatggatggtatatcttttttgtttgacatcaaacaattattcttttttttgtttgtttacattaaatggttattttattatttaaaactaaaggtggtctgtataactagaatgattatattgtatgtataatgaaaaaaatatacaccgatcaggcacatggagccgctaacaaagggtagatacccagacatcatgaggcagattgtgggtagtaggcttcccaactttaccgaggaagaagccgcactcgttgccggttcatatgattttcttggtctcaactattatgttactcagtacgcccagccacaacctaacccatatccttcagagacacacactgccatgatggacgctggagtaaagctcacatgtaccactctgtttccactttgttacaacctcctttctatatatatattcctttttgttataaaacatacttaatttgtgagtgaccataagttatttcttccttgtgtttacagataataactcacgtggtgaatatcttggtccactggtaattatgcatgatccatcctcatgatatctctctcattgatatgtatattttgttctgattgatatgtattttttgtttgcttccctttcccagttcgctgaagacaaaatagccggcaacagctattactacccaaaaggaatatattacgtaatggacttcttcaaaaccaattacagcaaccctttaatctatatcaccgagaacggtgagttctacatactacttactactcatctattctacataaattaattagtgtatttttatatattagtcgaggaaactgattttcaaatattgtggaatgttttcacggtttaattaggaataagttcgcccggtacagaaaaccgttgcgaagctattgccgattccaagcgcattgattatctctgcagtcatctatgttttctccgtaaggtcatcaagtaagtggatg

SEQ ID NO: 75 - DNA, 2321 bp, Brassica juncea
atgaagcttcatggactagccttgataggttttctaattgctgcggcgagttgcaaagctattgaggacattaattgccaagagaacgagcctttcacatgtggaaacactgatcagttaagcagtaaaattttcccaaaagacttcattttcggtgttgcttctgctgcttaccaggcatgttacaaatcaacaatttttgacgtagaaaaccatttaaaatattaaatccaacgttgcatggttgtttcttattattgtaggtggaagggggcagaggacgtggtcttaacgtttgggatggcttcactcaccgatacccaggtatatcatctacatggtacatatatatataatgtccacatctcttatatatcattcgtagtaatgtatatgtttactatcagagaagggtggatccgatctcgggaatggagacactacttgtgagtcatatacaagatggcaggttaattcctcactgagtcatataggaaaatggcaggttaattccacattcctcactatatataaatgatatccgagtgtgtatgtaaactgcgcagaaagatatagacatcatggacgagctcaatgctactggctacagattctcttttgcgtggtcaagaatcattccaagtatgaacacataaacgatctatttatacaaaaaattctcgtaaattgattgtgagtgttgagaagattaaatatatgatatgtatacatgagcagaaggaaaggtgagtaggggagtgaacaaaggaggtctcgaatactaccacaaactcatagatggtctcgtcgcaaagaatataacaccttttgttaccctctatcactgggacctacctcaaacactgcaagatgagtatgaaggtttcttgaaccgcaccatcatgtatgtcatttgtgccgcgttcttagcaagaaatataagaagaaaaacatatataagtgatctcatgttaatgatttgtttctatgctatgcacagagatgactttagagattatgcggatctatgtttcaaggaatttggtggaaaggtgaagaactggatcacgattaaccagctgtacacagtgcctacgagaggctatgcaatcggaacagatgcacccggtcgatgttctccgaaggttgatgagagatgttacggcggaaattcttcaacagaaccttatatagttgcacataaccagcttcttgctcatgctgcggcggtcgatgtttacaggacaaaatataaggtgagtatatataggtttgtaaataggtgtagtctaacatatatgtcaatgttctaatcatatcatttcatttcgtatgccgtgacaaacagttccaaggagggaagatcggaccagtgatgataactagatggtttcttccatttgatgagactgataaagctagcctatatgcagctgataggatgaaagaattcttcttgggatggtacgtatttgtatgtatatgtacacaaaaatgatatgattatttatacgtatgtacatcgatcaggttcatggagccgctaacaaagggtagatacccagacatcatgagacaaattgtgggtagtcggcttcccaatttcacggaagcagaagcagaactagttgcgggttcatatgattttcttggtctcaactactacaccactcagtatgcccagccaaaacctaacccagttacatgggaaaatcacactgccatgatggacccaggcgcaaagctcacatgtaccactcagtttcctcttatagttacaacctttctatatatatatatatatatataggcttctaagtcttttaaattaagcatatatatactttgtgagtgaccactaattatttcatcattgggtttacagatacgaattcacgtggtgaaaatcttggtccactggtatatgcatgatccacccctgacccctgttacttattattttttttctttctagttgatgtgtatacgtatgcttccttttctcagttcgttaaggacgaaataaacggcgactcctattactacccaaaaggcatttattacgttatggactacttcaaaaccaaataccgtaaccctttgatctatatcactgaaaacggtgactactactcatctctttttccatattaagcaaatatgtatgtttaaaataatgtacaagttgtttatgtaccatgatggttaaattaggatttagtactcccggtgaagaaacccgtgaggaagctattgctgattccaagcggatcgattatctctgcagtcatctatgttttctccgtaaggtcatcaggtga

SEQ ID NO: 76 - DNA, 2459 bp, Brassica juncea
atgaagcttcttcatggactcgctttagtttttctattagctgctgcgagttgcaaagctgatgaagaaattacttgcgaagagaacaatccattcacttgtagtaacactgatattttaagcagtaagaacttcggaaaagatttcatcttcggtgttgcatcttctgcttaccaggcatgtagcaaatgttgtcacaccctaattttgaaataaaatttaaaacactaaaatgcaactttgcatggttgcctcttttcatttcagatcgaaggagggagaggtcgtggtgttaacgtttgggatggcttcagtcaccgatacccaggtatgtcgtttgcacggtgacatctattttatatgtgagaggaatgttggttacatatacacatattaatgtatttgtaatttaatatcagagaaagctgggtcagatttgaagaatggagacactacttgtgagtcatatacgagatggcaggttaatttctcagtacattgatactcatgactgaactatagtatgtataaaaactatacgtgtggattgacatgagattaaaattaatatgtaaactgcagaaagatgtagacgtgatgggcgaactcaatgctactggctacagattctcctttgcgggggcaagaatcattccaagtatgtacatattatcgatcaattatatatatatatatatatataaatatatattattttttttaattgggatgatttagttggaagagtactaattaaagtacgatgtatatatacatgagcagaaggaaaggtgagtaggggagtgaaccaaggaggccttgattactaccacaaactcatagatgcactcctcgaaaaaaatataacgcctttcgttaccctctttcactgggatcttcctcaaacactccaagatgagtatgaaggtttcttggaccgccagatcatgtatgtgccatccttcttaattatatctgaagagagtaaatataattagtgatagaagaagaatatttggtttaatttacatgtattactgaaatgattctatactaatatgcacagccaagatttcaaagattacgcggatctatgtttcaaagaatttggtggaaaggtaaagcattggatcacgatcaaccagctatacacagtgcctacaagaggctatgcgatcggaacagatgcacccggtcgatgttctcctatggttgataccaagcacaggtgttacggcggaaattcttcaacagaaccctacatcgttgcacataaccagcttcttgctcatgccacggtcgtcgatctttacaggaccaaatataaggtgagtggcctccatatgtgaaaaggtggtctaaatctaacatatccgattctaatgtatagtcatatatatatcacgtgatgaacagttccaaaaagggaagattggacctgtgatgataactagatggtttcttccatatgatgaatctgatcctgcctccatagaagcagctgagaggatgaaccaattcttccatggatggtatatataattttatatattaccaaaaatgtatcagtttgtattttatgtattataatgaaacaaaaatatacttggatcaggtatatggagccgttaacaaagggtagatacccagacatcatgaggcagattgtgggtagtcggcttcccaacttcaccgaggaagaagcggaactcgttgctggttcatatgattttcttggtctcaactattacgtcactcagtacgcccagccaaaaccgaacccatatccttcagagacacacactgccatgatggacgctggcgtaaagctcacatgtactacaacattaccacttagttacaagctttctatatacatatatatatgtgctatctcctttttgttacaacatactttctgagtgaccatcaattatttcatccttgtgtttacagatgataattcacgtggtgaatttcttggtccactggtatatataaatgatcatccacccctttgatttctctttcaatttttttttctatttgcaatataacaccactttctccttgttaatatgtatatatatgtttgcttcctttctcagttcgttgaagacaaagtcaacggcaacagctattactacccaaaagggatttattacgtaatggactacttcaaaaccaaatacggcgacccattaatctatgtcaccgagaatggcgagttctacatacttccactactcatattttcatatataacatatcgtaattagtgtatttcgaaataaatccaagaaactgattttcaaatattgtatactttttcatgttatggcggttaattaggatttagtacccccagttcagaaaaccgtgagcaagctattgccgattacaagcgaattgattatctgtgcagtcatctatgttttctccgcaaggtcatcaagtga

SEQ ID NO: 77 - DNA, 2384 bp, Brassica juncea
atgaagcatctttggttcgcattagcttttctattagctttggcgatttgcaaagctgatgaagaaattacctgcgaagagaacctgccattcacatgtggtcaaactgatcgtttcaacagtagcagtttcgagaaagacttcatcttcggtcttgcatcttctgcttaccaggcatgtaacatatgctacatatcaaccattagtattatgttgccagacgtcatattaatttaacgtataaataacatcatatacgaacattaaaatccaacgttgcatggttgtttcgtttcatttcagatcgaaggtagcataaatcgtggacttaacgtttgggatggcttcactcaccgattcccacgtttgttttttgcattactcatcacatatgcatattatctcggttacatgtctccacgcacttatagtactgtatttgtttactatcagataaagcaggacccgatcatggaaatggagacactacttgtaactcatattcatactgggaggtaattaaattcctctatatgaatatgtgtgtgctaactaatattactcactgaattatctatcaactgccaacctagtgtggattgacatgcgattgtatgtgaactgcagaaagatatagaggtgatggacgaactcaaagctactggctacagattctccattgcctggtcaagaatcattccaagtatgtgaacgttattgatttatgtatatatatatatatatcatatatggtaatattcgattgtgattctttggaaagattatatattacgatacatatgagcaggaggaaagaggagcaggggagtacaccaaggaggtattaactactaccacggactcataaatggcctcatcgaaaagggtataacgcctttagttacgctctttcactgggaccttcctcaagtactacaagatgattatgaaggtttcttagacccccagatcatgtatgttaattatatttatggcatactgcttattaagaaagacgataatatatagatatttgttcttggattaatgaaatgattctataatactcgcagagatgatttcagagattacgcggatctatgtttcgaagaatttggtgacaaagtaaagcactggttcacaatcaaccagctctactcagtgcctacgagaggctatggattaggatcagatgcacctggtcgatgttctccaaaggttgatcctacatgttacgccggaaattcttcaacggaaccctatatcgttgcacataaccagctccttgctcatgccagggtggtcgatctttacaggacaaaatataaggtagattaattctccattttgtgaaaggtgtattctaacatatctgattctaaattaatcatatcactgtgtatatttatctgcgtgaccacagcatcaaggaggtaagattggacctgtgatgataactagatggtttcttccatataatgacactgatcaagacagcatagctgcaaccgagaggatgaaagaattcttcttgggatggtaaatgcttataaaatgaaattatattcttaacattaatatatgttgtatttatgaactgacgaaaaatatgtatttatgtacaccaggttcatggggcctctaacaaatggtacataccctcaaatcatgatagacactgtgggtgagcggcttccatccttcactccagaggaatccaaactcgtaaagggttcatatgattttcttggtctcaactattacttcagtcagtatgtccaaccaagtcctaatcgtgttgattgggatcgtcacattgccatgatggacgctggcacaaagctcacatgtatccatctatatatatttcgacttatttacaaccttaatttgccttttgttaagtacaataatttgtgaccatcaattatttgtgttaacagatcgtaatgcaagtaatcatctcattggtccagtggtatatatgcatccatccctattctttcatttttttctaagcaaaattcagttttctgatactatttcgcttctctttctaagttcgctgaacacagggaagacgagaccagaaacatctattactacccaaaaggcatttattatgtgatggattacttcaaaaccaagtacaataaccctttaatctatataaccgagaacggtgggttctactactctatctctaaattcatctctacatgttaaatgtaatttgaaatttgttgaaatgatttcatgttatgacggtttaactaggaatccttacctccggtgatgaaacccgtgaggaggctaagtttgattacagacggattgattatctctgcagtcatctctgttttctcagtaaagtcatcaagtga

SEQ ID NO: 78 - DNA, 2384 bp, Brassica juncea
atgaagcatctttggttcgcattagcttttctattagctttggcgatttgcaaagctgatgaagaaattacctgcgaagagaacctgccattcacatgtggtcaaactgatcgtttcaacagtagcagtttcgagaaagacttcatcttcggtcttgcatcttctgcttaccaggcatgtaacatatgctacatatcaaccattagtattatgttgccagacgtcatattaatttaacgtataaataacatcatatacgaacattaaaatccaacgttgcatggttgtttcgtttcatttcagatcgaaggtagcataaatcgtggacttaacgtttgggatggcttcactcaccgattcccacgtttgttttttgcattactcatcacatatgcatattatctcggttacatgtctccacgcacttatagtactgtatttgtttactatcagataaagcaggacccgatcatggaaatggagacactacttgtaactcatattcatactgggaggtaattaaattcctctatatgaatatgtgtgtgctaactaatattactcactgaattatctatcaactgccaacctagtgtggattgacatgcgattgtatgtgaactgcagaaagatatagaggtgatggacgaactcaaagctactggctacagattctccattgcctggtcaagaatcattccaagtatgtgaacgttattgatttatgtatatatatatatatatcatatatggtaatattcgattgtgattctttggaaagattatatattacgatacatatgagcaggaggaaagaggagcaggggagtacaccaaggaggtattaactactaccacggactcataaatggcctcatcgaaaagggtataacgcctttagttacgctctttcactgggaccttcctcaagtactacaagatgattatgaaggtttcttagacccccagatcatgtatgttaattatatttatggcatactgcttattaagaaagacgataatatatagatatttgttcttggattaatgaaatgattctataatactcgcagagatgatttcagagattacgcggatctatgtttcgaagaatttggtgacaaagtaaagcactggttcacaatcaaccagctctactcagtgcctacgagaggctatggattaggatcagatgcacctggtcgatgttctccaaaggttgattctacatgttacgccggaaattcttcaacggaaccctatatcgttgcacataaccagctccttgctcatgccagggtggtcgatctttacaggacaaaatataaggtagattaattctccattttgtgaaaggtgtattctaacatatctgattctaaattaatcatatcactgtgtatatttatctgcgtgaccacagcatcaaggaggtaagattggacctgtgatgataactagatggtttcttccatataatgacactgatcaagacagcatagctgcaaccgagaggatgaaagaattcttcttgggatggtaaatgcttataaaatgaaattatattcttaacattaatatatgttgtatttatgaactgacgaaaaatatgtatttatgtacaccaggttcatggggcctctaacaaatggtacataccctcaaatcatgatagacactgtgggtgagcggcttccatccttcactccagaggaatccaaactcgtaaagggttcatatgattttcttggtctcaactattacttcagtcagtatgtccaaccaagtcctaatcgtgttgattgggatcgtcacattgccatgatggacgctggcacaaagctcacatgtatccatctatatatatttcgacttatttacaaccttaatttgccttttgttaagtacaataatttgtgaccatcaattatttgtgttaacagatcgtaatgcaagtaatcatctcattggtccagtggtatatatgcatccatccctattctttcatttttttctaagcaaaattcagttttctgatactatttcgcttctctttctaagttcgctgaacacagggaagacgagaccagaaacatctattactacccaaaaggcatttattatgtgatggattacttcaaaaccaagtacaataaccctttaatctatataaccgagaacggtgggttctactactctatctctaaattcatctctacatgttaaatgtaatttgaaatttgttgaaatgatttcatgttatgacggtttaactaggaatccttacctccggtgatgaaacccgtgaggaggctaagtttgattacagacggattgattatctctgcagtcatctctgttttctcagtaaagtcatcaagtga

SEQ ID NO: 79 - DNA, 1374 bp, Brassica juncea
atgaagcatctttggctcacattagcttttctattggctttggcaacttgcaaagctgatgaagaaattacttgcgaagagaacctgccattcacatgtggtcaaactgatcgtttcaacagtagcagtttcgagaaagacttcatcttcggtcttgcatcttctgcttaccagatcgaaggtagcataaatcgtggagttaacgtttgggatggcttcactcaccgattcccagataaagcaggacccgatcatggaaatggagacactacttgtaactcatattcgtactgggagaaagatatagaggtgatggatgaactcaaagctactggctacagattctccattgcctggtcaagaatcattccaggaggaaagaggagcaggggagtacaccaaggaggtattaactactaccacggactcataaatggcctcatcgaaaagggtataacgcctttagttacgctctttcactgggaccttcctcaagtactacaagatgaatatgaaggtttattggaccctcagatcgatgatttcagagatttcgcggatctatgttttgaagaatatggtgataaagtaaagcactggttcacaatcaaccagctctactcagtgcctacgagaggctatggattaggatcagatgcacctggtcgatgttctccaaaggttgattctacatgttacgccggaaattcttcaacggaaccctatattgttgcacataaccagctccttgctcatgccacggtggtcgatctttacaggacaaaatataagcatcaaggaggtaagattggacctgtgatgataactagatggtttcttccatataatgacactgatccagactccatagctgcaaccgagaggatgaaagaattcttcttgagatggtacatggggccgctaacaaatggtacataccctcaaatcatgatagacactgtgggtgagcggctaccatcgttcactccagaggaatccaaactcgtaaagggttcatatgattttcttggtctcaactattacttcactcagtatgtccagccaagtcctaatcatgttgattcggatggtcacactgccatgatggacgctggcacaaggctcacagatcgtaatgcaagtaatcatgccattggcccagtggagaccaaaaacacctattactacccaaaaggcatttattatgtgatggatcacttcaaaaccaattacaatgaccctgtaatctatataaccgagaacctaggattcagtacctccggtgatgaaacccgtgaggaggctaagtttgattacaggcggattgattatctctgcagtcatctctgtttcctcagtaaagtcatcaagtga

SEQ ID NO: 80 - DNA, 1383 bp, Brassica juncea
atgaagcttcttcatggactcgctttagtttttctattagctgctgcgagttgcaaagctgatgaagaaattacttgcgaagagaacaatccattcacatgtagtaacactgatattttaagcagtaaaaacttcggaaaagacttcatcttcggtgttgcatcttctgcttaccagatcgaaggaggaagaggtcgtggtgttaacatttgggatggcttcagtcaccgatatccagagaaatcagggtcagatttgaagaatggagacactacttgtgagtcatatacgagatggcagaaagatgtagacgtgatgggcgaactcaatgctactggctacaggttctcctttgcgtggtcaagaatcattccagaaggaaaggtgagtaggggagtgaaccaaggaggtcttgattactaccacaaactcatagatgcactactcgaaaagaatataacgcctttcgttaccctctttcactgggaccttcctcaaacactccaagatgagtatgaaggtttcttagaccgccagatccaagatttcaaagactacgcggatctatgtttcaaagaatttggtggaaaggtaaagcactggatcacgatcaaccagctatacacagtccctacgagaggctatgcggtcggaacagatgcacccggtcgatgttctcctatggttgataccaagcacaggtgttacggtggaaattcttcaacagaaccctacatcgttgcacataaccagcttcttgctcatgccacggtcgtcgatctttacaggaccaaatataagtttcaaaaagggaagattggacctgtgatgataacaagatggtttcttccatttgatgagtctgatcctgcctccatagaagcagctgagaggatgaaccaattctttcatggatggtacatggagccgctaacaaagggtagatacccagacatcatgaggcagattgtgggtagtaggcttcccaactttaccgaggaagaagcccaactcgttgccggttcatatgattttcttggtctcaactattacgtcactcagtacgcccagccaaaacctaacccatatccttcagagacacacactgccatgatggacgctggcgtaaagctcacagatgataactcacgtggtgaatttcttggtccactggtaaacggcaacagctattactacccaaaaggcatttactacgtaatggactacttcaaaaccaaatacggagaccctttaatctatgtcaccgagaacttaggatttagtacccccagtgaagaaaaccgtgagcaggctattgccgattacaagcgaattgattatctctgcagtcatttatgttttctccgcaaggtcatcaagtga

SEQ ID NO: 81 - DNA, 1383 bp, Brassica juncea
atgaagcttcttcatggactcgctttagtttttctattagctgctgcgagttgcaaagctgatgaagaaattacttgcgaagagaacaacccattcacatgtagtaacactgatattttaagcagtaagaacttcggaaaagatttcatcttcggtgttgcatcttctgcttaccagattgaaggagggagaggtcgtggtgttaacgtttgggatggcttcagtcaccgatacccagagaaatcagggtcagacttgaagaatggagacactacttgtgagtcctatacgagatggcagaaagatgtagacgtgatgggcgaactcaatgctactggctacaggttctcctttgcgtggtcaagaatcattccagaaggaaaggtgagtaggggagtgaaccaaggaggtcttgattactaccacaaactcttagatgcactcctcgaaaagaatataacgcctttcgttaccctctttcactgggaccttcctcaaacactccaagatgagtatgaaggtttcttggaccgccagatccaagatttcaaagattacgcggatctatgtttcaaagaatttggtggaaaggtaaagcactggatcacgatcaaccagatatacacagtccctacgagaggctatgcggtcggaacagatgcacccggtcgatgttctcctatggttgataccaagcacaggtgttacggtggaaattcttcaacagaaccctacatcgttgcacataaccagcttcttgctcatgccacggtcgtcgatctttacaggaccaaatacaagttccaaaaagggaagattggacctgtaatgattacaagatggtttcttccatttgatgagtctgatcctgcctccatagaagcagctgagaggatgaaccaattcttccatggatggtacatggagccgctaacaaagggtagatacccagacatcatgaggcagattgtgggtagtaggcttcccaacttcaccgaggaagaagcagaactcgttgctggttcatatgattttcttggtctaaactattacgtcacccaatacgcccagccaaaacctaacccatatccttcagagacacacactgccatgatggacgctggcgtaaagctcacagatgataattcacgtggtgaatttcttggtccactggtaaacggcaacagctattactacccaaaaggcatttattacgttatggactacttcaaaaccaaatacggcgaccctttaatctatgtcaccgaaaatttaggatttagtacccccagttcagaaaaccgtgagcaagctattgccgactacaagcgaatcgattatctatgcagccatctatgttttctccgcaaggtgatcaagtga

SEQ ID NO: 82 - DNA, 1383 bp, Brassica juncea
atgaagcttcttcatggactcgctttagtttttctattagctgctgcgagttgcaaagctgatgaagaaattacttgcgaagagaacaatccattcacatgtagtaacactgatattttaagcagtaaaaacttcggaaaagacttcatcttcggtgttgcatcttctgcttaccagatcgaaggaggaagaggtcgtggtgttaacatttgggatggcttcagtcaccgatatccagagaaatcagggtcagatttgaagaatggagacactacttgtgagtcatatacgagatggcagaaagatgtagacgtgatgggcgaactcaatgctactggctacaggttctcctttgcgtggtcaagaatcattccagaaggaaaggtgagtaggggagtgaaccaaggaggtcttgattactaccacaaactcatagatgcacttctcgaaaagaatataacgcctttcgttaccctctttcactgggaccttcctcaaacactccaagatgagtatgaaggtttcttagaccgccagatccaagatttcaaagactacgcggatctatgtttcaaagaatttggtggaaaggtaaagcactggatcacgatcaaccagctatacacagtccctacgagaggctatgcggtcggaacagatgcacccggtcgatgttctcctatggttgataccaagcacaggtgttacggtggaaattcttcaacagaaccctacatcgttgcacataaccagcttcttgctcatgccacggtcgtcgatctttacaggaccaaatataagtttcaaaaagggaagattggacctgtgatgataacaagatggtttcttccatttgatgagtctgatcctgcctccatagaagcagctgagaggatgaaccaattctttcatggatggtacatggagccgctaacaaagggtagatacccagacatcatgaggcagattgtgggtagtaggcttcccaactttaccgaggaagaagccttactcgttgccggttcatatgattttcttggtctcaactattatgttactcagtacgcccagccaaaacctaacccatatccttcagagacacacactgccatgatggacgctggcgtaaagctcacagatgataactcacgtggtgaatttcttggtccactggtaaacggcaacagctattactacccaaaaggcatttactacgtaatggactacttcaaaaccaaatacggagaccctttaatctatgtcaccgagaacttaggatttagtacccccagtgaagaaaaccgtgagcaggctattgccgattacaagcgaattgattatctctgcagtcatttatgttttctccgcaaggtcatcaagtga

SEQ ID NO: 83 - DNA, 1380 bp, Brassica juncea
atgaagcttcttgggctcgctttagtttttctgttagcttctgcgagttgcaaagctgacgaagaaattacttgtgaagagaacaatccattcacatgtagtaacactgatattttaagcagtaaaaacttcggaaaagacttcatcttcggtgttgcatcttctgcttaccagatcgaaggagggagaggtcgtggtgttaacatttgggatggcttcagtcaccgatacccagagaaatcagggtcagatttgaagaatggagacactacttgtgagtcatatacgagatggcagaaagatgtagacgttatgggcgaactaaatgctactggctacagattttcctttgcgtggtcgagaatcattccagaaggaaaggtgagtaggggagtgaaccaaggaggtcttgattactaccacaaactcatagacgccctcctcgaaaagaatataactcctttcgttaccctctttcactgggaccttcctcaaacactccaagatgagtacgaaggtttcttggaccgccagatccaagatttcaaagattatgccgatctatgtttcaaagaatttggtggaaaggtaaagcactggatcacgatcaaccagctatacacagtccctacgagaggctatgcagtcggaacagatgcacccggtcgatgttctcctatggttgatactaagcacaggtgttacggcggaaattcttcaacagaaccctatatcgttgcacataaccagcttcttgctcatgccacggtcgtcgatctttacaggaccaaatataagttccaaaaagggaagattggacctgtgatgataacaagatggtttcttccatttgatgagtctgatccggcctccatagaagcagctgagaggatgaaccaattcttccatggatggtacatggagccgctaacaaagggtagatacccagacatcatgaggcagattgtgggtagtaggcttcccaactttaccgaggaagaagccaaactcgttgccggttcatatgattttcttggtctcaactattacgtcactcagtacgcccagccaaaacctaacccatatccttcagagacacacactgccatgatggacgctggtgtaaagctcacagatgataattcgcgtggtgaatttcttggtccactggataacggaaacagctattactatccaaaaggaatttattacgtgatggactacttcaaaaccaactacggcaaccctttaatctatgtcaccgagaacttaggatttagtacgcccagttcagaaaaccgtgagcaggctattgcggattacaagcgaattgattatctctgcagtcatctatgttttctccgtaaggtcatcaagtaa

SEQ ID NO: 84 - DNA, 1383 bp, Brassica juncea
atgaagcttcttcatggacttgctttagttttcctattagctgcttcgagttgcaaagctgatgaagaaattacatgtgaagagaacactccattcacatgtggtaacactgatattttaagcagtaaaaactttggaaaagacttcatcttcggtgttgcatcttctgcttaccagatcgaaggagggagaggtcgtggtgttaacatttgggatggcttcagtcaccgatacccagagaaatcagggtcagatttgatgaatggagacactacttgtgagtcatatacgagatggcagaaagatgtagacattatgggagaactcaatgctactggctacagattctcctttgcgtggtcaagaatcattccagaaggaaaagtgagtaggggagtgaaccaaggaggtcttgattactaccaccaactcatagacgccctcctagaaaagaatataacgcctttcgttaccctcttccactgggaccttcctcaaacactccaagatgagtatgaaggtttcttagaccgccagatccaagatttcaaagattacgcggatctatgtttcaatgaatttggtggaaaggtaaagcactggatcacgatcaaccagctatatacagtgccgacaagaggctatgcgagcggaacagatgcacccggtcgatgttcttatatggttgataccaagcacaggtgttacggcggaaattcttcaacagaaccctacatcgttgcacataaccagcttcttgctcatgccgcagttgtcgatctttacaggaccaaatataagttccaaaacgggaagattggacctgtgatgataacaagatggtttcttccatttgatgagtctgatcctgcttgcgtagaagcagctgagaggatgaaccaatttttccatggatggtacatggagccgctaacaaagggtagatacccagacatcatgaggcagatcgtgggtagtaggctccccaactttaccgaggaagaagccgcactcgttgctggttcatatgattttcttggtctcaactattacgtcactcagtacgcccagccacaacctaacccatatccttcagagacacacactgccatgatggaccctggtgtaaagctcacagataataattcacgtggtgaattacttggtccactggttaacggcaacagctattactacccaaaaggaatgtattacgtaatggacttcttcaaaaccaattacagcaaccctttaatatatatcaccgagaacttaggaattagttcgcccggtacagaaaaccgttgcgaagctattgccgattacaagcgaatcgattatctctgcagtcatctctgttttctccgtaaggtcatcaggtaa

SEQ ID NO: 85 - DNA, 1383 bp, Brassica juncea
atgaagcttcttcatggactcgctttagtttttctattagctactacgagttgcaaagcagatgaagaaattacttgcgaagagaacaatccattcacctgtagtaacactgatatattaagcagtaagaacttcggaaaaaatttcatcttcggtgttgcatcttctgcttaccagatagaaggagggagaggtcgtggtgttaacgtttgggatggcttcagtcaccggtacccagagaaagctgggtcagatttgaagaatggagacactacttgtgagtcatatacgagatggcagaaagatgtagacgtgatgggcgaaatcaatgctactggctacagattctcctttgcatggtcaagaatcattccagaaggaaaggtgagtaggggagtgaaccaaggaggtcttcaatactaccacaaactcatagatgcactcctggaaaagaatataacgcctttcgttaccctctatcactgggaccttcctcaaacactccaagatgagtatgaaggtttcttggaccgccagatccaagatttcaaagattacgcggatctatgtttcaaagaatttggtggaaaggtaaagcactggatcacaatcaaccagctatacacagtgcctacgagaggctatgcactcggaacagatgcacccggtcgatgttcttatatggttgataacaagcacaggtgttatggcggaaattcttcaacagaaccctatatcgttgcacataaccagcttcttgctcatgccacgatcgtcgatctttacaggaccaaatataagttccaaaaagggaagattggacctgtgatgataactagatggtttcttccatatgatgagtctgatccttcttgcgtagaagcagctgagaggatgaaccaattcttccatggatggtacatggagccgctaacaaagggtagatacccagacatcatgaggcagattgtgggtagtaggctccccaacttcactgaagctgaagccgaactcgttgctggttcatatgattttcttggtctcaactattacgtcactcagtatgcccagccgaaacctaacccatatccttcagagacacacactgccttgatggacgctggcgtaaagctcacagatgataattcacgtggtgaattccttggtccactggacaacggcaacagctattactacccaaaagggatttattacgtaatggactacttcaaaaccaaatacggtgacccattaatctatgtcaccgagaatttaggatttagcacgcccactacagaaaaccgtggcgaagctattgccgattacaagcgaattgattatctttgcagtcatctatgttttctccgtaaggtcatcaagtga

SEQ ID NO: 86 - DNA, 1383 bp, Brassica juncea
atgaagcttcttcgtcgactcgctttagtttttctattagctgctgcgagttgcaaggctgatgaagaaattacttgcgaagagaacaatccatttacttgtagtaacactgatattttaagcagcaagaacttcggaaaagatttcatctttggtgttgcgtcttctgcttaccagattgaaggagggagaggtcgtggtgttaatgtttgggatggtttcagtcaccggtacccagagaaagctgggtcagatttgaagaatggagacactacttgtgagtcatatacgagatggcagaaagatgtagacgtgatgggcgaaatcaatgctactggctacagattctcctttgcatggtcaagaatcattccagaaggaaaggtgagtaggggagtgaaccaaggaggtcttgattattaccaccaactcatagatgcactcctcgaaaagaatataacgcctttcgtaaccctctttcactgggaccttcctcaaacactccaagatgagtatgaaggtttcttggaccgccagatccaggatttcaaagattacgcggatctatgtttcaaagaatttggtggaaaggtaaagcattggatcacgatcaaccagctatacacagttcctacaagaggctatgcagtcggaacagatgcacccggtcgatgttctcctatggttgataccaaacacaggtgttacggcggaaattcttcaacagaaccctacatcgttgcacataaccagcttcttgctcatgccacggtcgtcgatctttacaggaccaaatataagttccaaaacgggaagattggacctgtgatgataacaagatggtttcttccatatgatgagtctgatcctgcctgcatagaagcagctgagaggatgaaccaattcttccatggatggtacatggagccgctaacgaagggtagatacccagacatcatgaggcaaattgtgggtagtaggcttcccaactttaccgaggaagaagccgcactcgttgccggttcatatgattttcttggtctcaactattatgtcactcagtacgcccggccacaacctaacccatatccttcagagacacacactgccatgatggacgctggagtaaagctcacagatgataattcacgtggtgaaatacttggtccactggttaatggcaacagctattactacccaaaaggaatttattacgtaatggactttttcaaaaccaattacagcaaccctttaatctatatcaccgagaacttaggaattagttcgcccagtacagaaagccgttgtgaagctattgccgattacaagcgaattgattatctctgcagtcatctatgttttctccgtaaggtcatcaagtga

SEQ ID NO: 87 - DNA, 1377 bp, Brassica juncea
atgaagattcttcatggactcgctttagtttttctattagctattgcgagttgcaaagcttatgaagaaattacttgcgaacagaacgaaccattcacatgtggtaacactgatatcttaagcagtaaaaacttcggagaagacttcatcttcggtgttgcatcttctgcgtaccagatcgaaggagggagaggtcgtggtgttaacgtttgggatggtttcagtcaccgatacccagagaaatcagggtcagatttgctgaatggagacacttcttgtgagtcatatacgagatggaagaaagatgtagagattatgggagaactcaatgctactggctacagattctccttagcgtggtcaagaatcattccagaaggaaaggtgagtaggggagtgaaccaaggaggtcttgattactaccaccaactcatagacgccctcctcgaaaagaatataactcctttcgttaccctctttcactgggaccttcctcaaacactccaagatgagtatgaaggttttttggatcgccagatccaagatttcaaagactatgcggatctatgtttcaaagaatttggtggaaaggtaaagcactggatcacgatcaaccagctattcacagtgcctacgagaggctatgcactcggaacagatgcacccggtagatgttctcctatgattgatgagaggtgttacggcggaaactcttcaacagaaccctatattgttgcacataaccagcttctcgctcatgctgcggtcgtcgatctttacaggaccaactataaggaccaacaagggaagattggacctgtgatgataacaagatggtttcttccatatgatgagtctgatcccgcttgcgtagaagcagctgagaggatgaaccaattcttccatggatggcacatggagccgctaacaaagggtagatacccagacatcatgaggcagattgtgggtagtaggcttcccaactttaccgaggaagaagccgcactcgttgccggttcatatgattttcttggtctcaactattatgttactcagtacgcccagccacaacctaacccatatccttcagagacacacactgccatgatggacgctggagtaaagctcacagataataactcacgtggtgaatatcttggtccactgatagccggcaacagctattactacccaaaaggaatatattacgtaatggacttcttcaaaaccaattacagcaaccctttaatctatatcaccgagaacttaggaataagttcgcccggtacagaaaaccgttgcgaagctattgccgattccaagcgcattgattatctctgcagtcatctatgttttctccgtaaggtcatcaagtaa

SEQ ID NO: 88 - DNA, 1377 bp, Brassica juncea
atgaagcttcatggactagccttgataggttttctaattgctgcggcgagttgcaaagctattgaggacattaattgccaagagaacgagcctttcacatgtggaaacactgatcagttaagcagtaaaattttcccaaaagacttcattttcggtgttgcttctgctgcttaccaggtggaagggggcagaggacgtggtcttaacgtttgggatggcttcactcaccgatacccagagaagggtggatccgatctcgggaatggagacactacttgtgagtcatatacaagatggcagaaagatatagacatcatggacgagctcaatgctactggctacagattctcttttgcgtggtcaagaatcattccagaaggaaaggtgagtaggggagtgaacaaaggaggtctcgaatactaccacaaactcatagatggtctcgtcgcaaagaatataacaccttttgttaccctctatcactgggacctacctcaaacactgcaagatgagtatgaaggtttcttgaaccgcaccatcgatgactttagagattatgcggatctatgtttcaaggaatttggtggaaaggtgaagaactggatcacgattaaccagctgtacacagtgcctacgagaggctatgcaatcggaacagatgcacccggtcgatgttctccgaaggttgatgagagatgttacggcggaaattcttcaacagaaccttatatagttgcacataaccagcttcttgctcatgctgcggcggtcgatgtttacaggacaaaatataagttccaaggagggaagatcggaccagtgatgataactagatggtttcttccatttgatgagactgataaagctagcctatatgcagctgataggatgaaagaattcttcttgggatggttcatggagccgctaacaaagggtagatacccagacatcatgagacaaattgtgggtagtcggcttcccaatttcacggaagcagaagcagaactagttgcgggttcatatgattttcttggtctcaactactacaccactcagtatgcccagccaaaacctaacccagttacatgggaaaatcacactgccatgatggacccaggcgcaaagctcacagatacgaattcacgtggtgaaaatcttggtccactgataaacggcgactcctattactacccaaaaggcatttattacgttatggactacttcaaaaccaaataccgtaaccctttgatctatatcactgaaaacttaggatttagtactcccggtgaagaaacccgtgaggaagctattgctgattccaagcggatcgattatctctgcagtcatctatgttttctccgtaaggtcatcaggtga

SEQ ID NO: 89 - DNA, 1383 bp, Brassica juncea
atgaagcttcttcatggactcgctttagtttttctattagctgctgcgagttgcaaagctgatgaagaaattacttgcgaagagaacaatccattcacttgtagtaacactgatattttaagcagtaagaacttcggaaaagatttcatcttcggtgttgcatcttctgcttaccagatcgaaggagggagaggtcgtggtgttaacgtttgggatggcttcagtcaccgatacccagagaaagctgggtcagatttgaagaatggagacactacttgtgagtcatatacgagatggcagaaagatgtagacgtgatgggcgaactcaatgctactggctacagattctcctttgcgggggcaagaatcattccagaaggaaaggtgagtaggggagtgaaccaaggaggccttgattactaccacaaactcatagatgcactcctcgaaaaaaatataacgcctttcgttaccctctttcactgggatcttcctcaaacactccaagatgagtatgaaggtttcttggaccgccagatccaagatttcaaagattacgcggatctatgtttcaaagaatttggtggaaaggtaaagcattggatcacgatcaaccagctatacacagtgcctacaagaggctatgcgatcggaacagatgcacccggtcgatgttctcctatggttgataccaagcacaggtgttacggcggaaattcttcaacagaaccctacatcgttgcacataaccagcttcttgctcatgccacggtcgtcgatctttacaggaccaaatataagttccaaaaagggaagattggacctgtgatgataactagatggtttcttccatatgatgaatctgatcctgcctccatagaagcagctgagaggatgaaccaattcttccatggatggtatatggagccgttaacaaagggtagatacccagacatcatgaggcagattgtgggtagtcggcttcccaacttcaccgaggaagaagcggaactcgttgctggttcatatgattttcttggtctcaactattacgtcactcagtacgcccagccaaaaccgaacccatatccttcagagacacacactgccatgatggacgctggcgtaaagctcacagatgataattcacgtggtgaatttcttggtccactggtcaacggcaacagctattactacccaaaagggatttattacgtaatggactacttcaaaaccaaatacggcgacccattaatctatgtcaccgagaatttaggatttagtacccccagttcagaaaaccgtgagcaagctattgccgattacaagcgaattgattatctgtgcagtcatctatgttttctccgcaaggtcatcaagtga

SEQ ID NO: 90 - DNA, 1374 bp, Brassica juncea
atgaagcatctttggttcgcattagcttttctattagctttggcgatttgcaaagctgatgaagaaattacctgcgaagagaacctgccattcacatgtggtcaaactgatcgtttcaacagtagcagtttcgagaaagacttcatcttcggtcttgcatcttctgcttaccagatcgaaggtagcataaatcgtggacttaacgtttgggatggcttcactcaccgattcccagataaagcaggacccgatcatggaaatggagacactacttgtaactcatattcatactgggagaaagatatagaggtgatggacgaactcaaagctactggctacagattctccattgcctggtcaagaatcattccaggaggaaagaggagcaggggagtacaccaaggaggtattaactactaccacggactcataaatggcctcatcgaaaagggtataacgcctttagttacgctctttcactgggaccttcctcaagtactacaagatgattatgaaggtttcttagacccccagatcgatgatttcagagattacgcggatctatgtttcgaagaatttggtgacaaagtaaagcactggttcacaatcaaccagctctactcagtgcctacgagaggctatggattaggatcagatgcacctggtcgatgttctccaaaggttgatcctacatgttacgccggaaattcttcaacggaaccctatatcgttgcacataaccagctccttgctcatgccagggtggtcgatctttacaggacaaaatataagcatcaaggaggtaagattggacctgtgatgataactagatggtttcttccatataatgacactgatcaagacagcatagctgcaaccgagaggatgaaagaattcttcttgggatggttcatggggcctctaacaaatggtacataccctcaaatcatgatagacactgtgggtgagcggcttccatccttcactccagaggaatccaaactcgtaaagggttcatatgattttcttggtctcaactattacttcagtcagtatgtccaaccaagtcctaatcgtgttgattgggatcgtcacattgccatgatggacgctggcacaaagctcacagatcgtaatgcaagtaatcatctcattggtccagtggagaccagaaacatctattactacccaaaaggcatttattatgtgatggattacttcaaaaccaagtacaataaccctttaatctatataaccgagaacctaggaatccttacctccggtgatgaaacccgtgaggaggctaagtttgattacagacggattgattatctctgcagtcatctctgttttctcagtaaagtcatcaagtga

SEQ ID NO: 91 - DNA, 1374 bp, Brassica juncea
atgaagcatctttggttcgcattagcttttctattagctttggcgatttgcaaagctgatgaagaaattacctgcgaagagaacctgccattcacatgtggtcaaactgatcgtttcaacagtagcagtttcgagaaagacttcatcttcggtcttgcatcttctgcttaccagatcgaaggtagcataaatcgtggacttaacgtttgggatggcttcactcaccgattcccagataaagcaggacccgatcatggaaatggagacactacttgtaactcatattcatactgggagaaagatatagaggtgatggacgaactcaaagctactggctacagattctccattgcctggtcaagaatcattccaggaggaaagaggagcaggggagtacaccaaggaggtattaactactaccacggactcataaatggcctcatcgaaaagggtataacgcctttagttacgctctttcactgggaccttcctcaagtactacaagatgattatgaaggtttcttagacccccagatcgatgatttcagagattacgcggatctatgtttcgaagaatttggtgacaaagtaaagcactggttcacaatcaaccagctctactcagtgcctacgagaggctatggattaggatcagatgcacctggtcgatgttctccaaaggttgattctacatgttacgccggaaattcttcaacggaaccctatatcgttgcacataaccagctccttgctcatgccagggtggtcgatctttacaggacaaaatataagcatcaaggaggtaagattggacctgtgatgataactagatggtttcttccatataatgacactgatcaagacagcatagctgcaaccgagaggatgaaagaattcttcttgggatggttcatggggcctctaacaaatggtacataccctcaaatcatgatagacactgtgggtgagcggcttccatccttcactccagaggaatccaaactcgtaaagggttcatatgattttcttggtctcaactattacttcagtcagtatgtccaaccaagtcctaatcgtgttgattgggatcgtcacattgccatgatggacgctggcacaaagctcacagatcgtaatgcaagtaatcatctcattggtccagtggagaccagaaacatctattactacccaaaaggcatttattatgtgatggattacttcaaaaccaagtacaataaccctttaatctatataaccgagaacctaggaatccttacctccggtgatgaaacccgtgaggaggctaagtttgattacagacggattgattatctctgcagtcatctctgttttctcagtaaagtcatcaagtga

SEQ ID NO: 92 - DNA, 1383 bp, Brassica juncea
atgaagcttcttcatggactcgctttagtttttctattagctgctgcgagttgcaaagctgatgaagaaattacttgcgaagagaacaatccattcacatgtagtaacactgatattttaagcagtaaaaacttcggaaaagacttcatcttcggtgttgcatcttctgcttaccagatcgaaggaggaagaggtcgtggtgttaacatttgggatggcttcagtcaccgatatccagagaaatcagggtcagatttgaagaatggagacactacttgtgagtcatatacgagatggcagaaagatgtagacgtgatgggcgaactcaatgctactggctacaggttctcctttgcgtggtcaagaatcattccagaaggaaaggtgagtaggggagtgaaccaaggaggtcttgattactaccacaaactcatagatgcacttctcgaaaagaatataacgcctttcgttaccctctttcactgggaccttcctcaaacactccaagatgagtatgaaggtttcttagaccgccagatccaagatttcaaagactacgcggatctatgtttcaaagaatttggtggaaaggtaaagcactggatcacgatcaaccagctatacacagtccctacgagaggctatgcggtcggaacagatgcacccggtcgatgttctcctatggttgataccaagcacaggtgttacggtggaaattcttcaacagaaccctacatcgttgcacataaccagcttcttgctcatgccacggtcgtcgatctttacaggaccaaatataagtttcaaaaagggaagattggacctgtgatgataacaagatggtttcttccatttgatgagtctgatcctgcctccatagaagcagctgagaggatgaaccaattctttcatggatggtacatggagccgctaacaaagggtagatacccagacatcatgaggcagattgtgggtagtaggcttcccaactttaccgaggaagaagccttactcgttgccggttcatatgattttcttggtctcaactattatgttactcagtacgcccagccttaacctaacccatatccttcagagacacacactgccatgatggacgctggcgtaaagctcacagatgataactcacgtggtgaatttcttggtccactggtaaacggcaacagctattactacccaaaaggcatttactacgtaatggactacttcaaaaccaaatacggagaccctttaatctatgtcaccgagaacttaggatttagtacccccagtgaagaaaaccgtgagcaggctattgccgattacaagcgaattgattatctctgcagtcatttatgttttctccgcaaggtcatcaagtga

SEQ ID NO: 93 - protein, 457 aa, Brassica juncea
MKHLWLTLAFLLALATCKADEEITCEENLPFTCGQTDRFNSSSFEKDFIFGLASSAYQIEGSINRGVNVWDGFTHRFPDKAGPDHGNGDTTCNSYSYWEKDIEVMDELKATGYRFSIAWSRIIPGGKRSRGVHQGGINYYHGLINGLIEKGITPLVTLFHWDLPQVLQDEYEGLLDPQIDDFRDFADLCFEEYGDKVKHWFTINQLYSVPTRGYGLGSDAPGRCSPKVDSTCYAGNSSTEPYIVAHNQLLAHATVVDLYRTKYKHQGGKIGPVMITRWFLPYNDTDPDSIAATERMKEFFLRWYMGPLTNGTYPQIMIDTVGERLPSFTPEESKLVKGSYDFLGLNYYFTQYVQPSPNHVDSDGHTAMMDAGTRLTDRNASNHAIGPVETKNTYYYPKGIYYVMDHFKTNYNDPVIYITENLGFSTSGDETREEAKFDYRRIDYLCSHLCFLSKVIK

SEQ ID NO: 94 - protein, 460 aa, Brassica juncea
MKLLHGLALVFLLAAASCKADEEITCEENNPFTCSNTDILSSKNFGKDFIFGVASSAYQIEGGRGRGVNIWDGFSHRYPEKSGSDLKNGDTTCESYTRWQKDVDVMGELNATGYRFSFAWSRIIPEGKVSRGVNQGGLDYYHKLIDALLEKNITPFVTLFHWDLPQTLQDEYEGFLDRQIQDFKDYADLCFKEFGGKVKHWITINQLYTVPTRGYAVGTDAPGRCSPMVDTKHRCYGGNSSTEPYIVAHNQLLAHATVVDLYRTKYKFQKGKIGPVMITRWFLPFDESDPASIEAAERMNQFFHGWYMEPLTKGRYPDIMRQIVGSRLPNFTEEEAQLVAGSYDFLGLNYYVTQYAQPKPNPYPSETHTAMMDAGVKLTDDNSRGEFLGPLVNGNSYYYPKGIYYVMDYFKTKYGDPLIYVTENLGFSTPSEENREQAIADYKRIDYLCSHLCFLRKVIK

SEQ ID NO: 95 - protein, 460 aa, Brassica juncea
MKLLHGLALVFLLAAASCKADEEITCEENNPFTCSNTDILSSKNFGKDFIFGVASSAYQIEGGRGRGVNVWDGFSHRYPEKSGSDLKNGDTTCESYTRWQKDVDVMGELNATGYRFSFAWSRIIPEGKVSRGVNQGGLDYYHKLLDALLEKNITPFVTLFHWDLPQTLQDEYEGFLDRQIQDFKDYADLCFKEFGGKVKHWITINQIYTVPTRGYAVGTDAPGRCSPMVDTKHRCYGGNSSTEPYIVAHNQLLAHATVVDLYRTKYKFQKGKIGPVMITRWFLPFDESDPASIEAAERMNQFFHGWYMEPLTKGRYPDIMRQIVGSRLPNFTEEEAELVAGSYDFLGLNYYVTQYAQPKPNPYPSETHTAMMDAGVKLTDDNSRGEFLGPLVNGNSYYYPKGIYYVMDYFKTKYGDPLIYVTENLGFSTPSSENREQAIADYKRIDYLCSHLCFLRKVIK

SEQ ID NO: 96 - protein, 460 aa, Brassica juncea
MKLLHGLALVFLLAAASCKADEEITCEENNPFTCSNTDILSSKNFGKDFIFGVASSAYQIEGGRGRGVNIWDGFSHRYPEKSGSDLKNGDTTCESYTRWQKDVDVMGELNATGYRFSFAWSRIIPEGKVSRGVNQGGLDYYHKLIDALLEKNITPFVTLFHWDLPQTLQDEYEGFLDRQIQDFKDYADLCFKEFGGKVKHWITINQLYTVPTRGYAVGTDAPGRCSPMVDTKHRCYGGNSSTEPYIVAHNQLLAHATVVDLYRTKYKFQKGKIGPVMITRWFLPFDESDPASIEAAERMNQFFHGWYMEPLTKGRYPDIMRQIVGSRLPNFTEEEALLVAGSYDFLGLNYYVTQYAQPKPNPYPSETHTAMMDAGVKLTDDNSRGEFLGPLVNGNSYYYPKGIYYVMDYFKTKYGDPLIYVTENLGFSTPSEENREQAIADYKRIDYLCSHLCFLRKVIK

SEQ ID NO: 97 - protein, 459 aa, Brassica juncea
MKLLGLALVFLLASASCKADEEITCEENNPFTCSNTDILSSKNFGKDFIFGVASSAYQIEGGRGRGVNIWDGFSHRYPEKSGSDLKNGDTTCESYTRWQKDVDVMGELNATGYRFSFAWSRIIPEGKVSRGVNQGGLDYYHKLIDALLEKNITPFVTLFHWDLPQTLQDEYEGFLDRQIQDFKDYADLCFKEFGGKVKHWITINQLYTVPTRGYAVGTDAPGRCSPMVDTKHRCYGGNSSTEPYIVAHNQLLAHATVVDLYRTKYKFQKGKIGPVMITRWFLPFDESDPASIEAAERMNQFFHGWYMEPLTKGRYPDIMRQIVGSRLPNFTEEEAKLVAGSYDFLGLNYYVTQYAQPKPNPYPSETHTAMMDAGVKLTDDNSRGEFLGPLDNGNSYYYPKGIYYVMDYFKTNYGNPLIYVTENLGFSTPSSENREQAIADYKRIDYLCSHLCFLRKVIK

SEQ ID NO: 98 - protein, 460 aa, Brassica juncea
MKLLHGLALVFLLAASSCKADEEITCEENTPFTCGNTDILSSKNFGKDFIFGVASSAYQIEGGRGRGVNIWDGFSHRYPEKSGSDLMNGDTTCESYTRWQKDVDIMGELNATGYRFSFAWSRIIPEGKVSRGVNQGGLDYYHQLIDALLEKNITPFVTLFHWDLPQTLQDEYEGFLDRQIQDFKDYADLCFNEFGGKVKHWITINQLYTVPTRGYASGTDAPGRCSYMVDTKHRCYGGNSSTEPYIVAHNQLLAHAAVVDLYRTKYKFQNGKIGPVMITRWFLPFDESDPACVEAAERMNQFFHGWYMEPLTKGRYPDIMRQIVGSRLPNFTEEEAALVAGSYDFLGLNYYVTQYAQPQPNPYPSETHTAMMDPGVKLTDNNSRGELLGPLVNGNSYYYPKGMYYVMDFFKTNYSNPLIYITENLGISSPGTENRCEAIADYKRIDYLCSHLCFLRKVIR

SEQ ID NO: 99 - protein, 460 aa, Brassica juncea
MKLLHGLALVFLLATTSCKADEEITCEENNPFTCSNTDILSSKNFGKNFIFGVASSAYQIEGGRGRGVNVWDGFSHRYPEKAGSDLKNGDTTCESYTRWQKDVDVMGEINATGYRFSFAWSRIIPEGKVSRGVNQGGLQYYHKLIDALLEKNITPFVTLYHWDLPQTLQDEYEGFLDRQIQDFKDYADLCFKEFGGKVKHWITINQLYTVPTRGYALGTDAPGRCSYMVDNKHRCYGGNSSTEPYIVAHNQLLAHATIVDLYRTKYKFQKGKIGPVMITRWFLPYDESDPSCVEAAERMNQFFHGWYMEPLTKGRYPDIMRQIVGSRLPNFTEAEAELVAGSYDFLGLNYYVTQYAQPKPNPYPSETHTALMDAGVKLTDDNSRGEFLGPLDNGNSYYYPKGIYYVMDYFKTKYGDPLIYVTENLGFSTPTTENRGEAIADYKRIDYLCSHLCFLRKVIK

SEQ ID NO: 100 - protein, 460 aa, Brassica juncea
MKLLRRLALVFLLAAASCKADEEITCEENNPFTCSNTDILSSKNFGKDFIFGVASSAYQIEGGRGRGVNVWDGFSHRYPEKAGSDLKNGDTTCESYTRWQKDVDVMGEINATGYRFSFAWSRIIPEGKVSRGVNQGGLDYYHQLIDALLEKNITPFVTLFHWDLPQTLQDEYEGFLDRQIQDFKDYADLCFKEFGGKVKHWITINQLYTVPTRGYAVGTDAPGRCSPMVDTKHRCYGGNSSTEPYIVAHNQLLAHATVVDLYRTKYKFQNGKIGPVMITRWFLPYDESDPACIEAAERMNQFFHGWYMEPLTKGRYPDIMRQIVGSRLPNFTEEEAALVAGSYDFLGLNYYVTQYARPQPNPYPSETHTAMMDAGVKLTDDNSRGEILGPLVNGNSYYYPKGIYYVMDFFKTNYSNPLIYITENLGISSPSTESRCEAIADYKRIDYLCSHLCFLRKVIK

SEQ ID NO: 101 - protein, 458 aa, Brassica juncea
MKILHGLALVFLLAIASCKAYEEITCEQNEPFTCGNTDILSSKNFGEDFIFGVASSAYQIEGGRGRGVNVWDGFSHRYPEKSGSDLLNGDTSCESYTRWKKDVEIMGELNATGYRFSLAWSRIIPEGKVSRGVNQGGLDYYHQLIDALLEKNITPFVTLFHWDLPQTLQDEYEGFLDRQIQDFKDYADLCFKEFGGKVKHWITINQLFTVPTRGYALGTDAPGRCSPMIDERCYGGNSSTEPYIVAHNQLLAHAAVVDLYRTNYKDQQGKIGPVMITRWFLPYDESDPACVEAAERMNQFFHGWHMEPLTKGRYPDIMRQIVGSRLPNFTEEEAALVAGSYDFLGLNYYVTQYAQPQPNPYPSETHTAMMDAGVKLTDNNSRGEYLGPLIAGNSYYYPKGIYYVMDFFKTNYSNPLIYITENLGISSPGTENRCEAIADSKRIDYLCSHLCFLRKVIK

SEQ ID NO: 102 - protein, 458 aa, Brassica juncea
MKLHGLALIGFLIAAASCKAIEDINCQENEPFTCGNTDQLSSKIFPKDFIFGVASAAYQVEGGRGRGLNVWDGFTHRYPEKGGSDLGNGDTTCESYTRWQKDIDIMDELNATGYRFSFAWSRIIPEGKVSRGVNKGGLEYYHKLIDGLVAKNITPFVTLYHWDLPQTLQDEYEGFLNRTIDDFRDYADLCFKEFGGKVKNWITINQLYTVPTRGYAIGTDAPGRCSPKVDERCYGGNSSTEPYIVAHNQLLAHAAAVDVYRTKYKFQGGKIGPVMITRWFLPFDETDKASLYAADRMKEFFLGWFMEPLTKGRYPDIMRQIVGSRLPNFTEAEAELVAGSYDFLGLNYYTTQYAQPKPNPVTWENHTAMMDPGAKLTDTNSRGENLGPLINGDSYYYPKGIYYVMDYFKTKYRNPLIYITENLGFSTPGEETREEAIADSKRIDYLCSHLCFLRKVIR

SEQ ID NO: 103 - protein, 460 aa, Brassica juncea
MKLLHGLALVFLLAAASCKADEEITCEENNPFTCSNTDILSSKNFGKDFIFGVASSAYQIEGGRGRGVNVWDGFSHRYPEKAGSDLKNGDTTCESYTRWQKDVDVMGELNATGYRFSFAGARIIPEGKVSRGVNQGGLDYYHKLIDALLEKNITPFVTLFHWDLPQTLQDEYEGFLDRQIQDFKDYADLCFKEFGGKVKHWITINQLYTVPTRGYAIGTDAPGRCSPMVDTKHRCYGGNSSTEPYIVAHNQLLAHATVVDLYRTKYKFQKGKIGPVMITRWFLPYDESDPASIEAAERMNQFFHGWYMEPLTKGRYPDIMRQIVGSRLPNFTEEEAELVAGSYDFLGLNYYVTQYAQPKPNPYPSETHTAMMDAGVKLTDDNSRGEFLGPLVNGNSYYYPKGIYYVMDYFKTKYGDPLIYVTENLGFSTPSSENREQAIADYKRIDYLCSHLCFLRKVIK

SEQ ID NO: 104 - protein, 457 aa, Brassica juncea
MKHLWFALAFLLALAICKADEEITCEENLPFTCGQTDRFNSSSFEKDFIFGLASSAYQIEGSINRGLNVWDGFTHRFPDKAGPDHGNGDTTCNSYSYWEKDIEVMDELKATGYRFSIAWSRIIPGGKRSRGVHQGGINYYHGLINGLIEKGITPLVTLFHWDLPQVLQDDYEGFLDPQIDDFRDYADLCFEEFGDKVKHWFTINQLYSVPTRGYGLGSDAPGRCSPKVDPTCYAGNSSTEPYIVAHNQLLAHARVVDLYRTKYKHQGGKIGPVMITRWFLPYNDTDQDSIAATERMKEFFLGWFMGPLTNGTYPQIMIDTVGERLPSFTPEESKLVKGSYDFLGLNYYFSQYVQPSPNRVDWDRHIAMMDAGTKLTDRNASNHLIGPVETRNIYYYPKGIYYVMDYFKTKYNNPLIYITENLGILTSGDETREEAKFDYRRIDYLCSHLCFLSKVIK

SEQ ID NO: 105 - protein, 457 aa, Brassica juncea
MKHLWFALAFLLALAICKADEEITCEENLPFTCGQTDRFNSSSFEKDFIFGLASSAYQIEGSINRGLNVWDGFTHRFPDKAGPDHGNGDTTCNSYSYWEKDIEVMDELKATGYRFSIAWSRIIPGGKRSRGVHQGGINYYHGLINGLIEKGITPLVTLFHWDLPQVLQDDYEGFLDPQIDDFRDYADLCFEEFGDKVKHWFTINQLYSVPTRGYGLGSDAPGRCSPKVDSTCYAGNSSTEPYIVAHNQLLAHARVVDLYRTKYKHQGGKIGPVMITRWFLPYNDTDQDSIAATERMKEFFLGWFMGPLTNGTYPQIMIDTVGERLPSFTPEESKLVKGSYDFLGLNYYFSQYVQPSPNRVDWDRHIAMMDAGTKLTDRNASNHLIGPVETRNIYYYPKGIYYVMDYFKTKYNNPLIYITENLGILTSGDETREEAKFDYRRIDYLCSHLCFLSKVIK

SEQ ID NO: 106 - DNA, 23 bp, Artificial
  spacer
gtggaaaggtaaagcactggatc

SEQ ID NO: 107 - DNA, 23 bp, Artificial
  spacer
gtggaaaggtgaagaactggatc

SEQ ID NO: 108 - DNA, 23 bp, Artificial
  spacer
gtgacaaagtaaagcactggttc

SEQ ID NO: 109 - DNA, 23 bp, Artificial
  spacer
gtcctgtaaagatcgacgaccgt

SEQ ID NO: 110 - DNA, 23 bp, Artificial
  spacer
cgccgtaacacctgtgcttggta

SEQ ID NO: 111 - DNA, 23 bp, Artificial
  spacer
cgccgtaacatctctcatcaacc

SEQ ID NO: 112 - DNA, 23 bp, Artificial
  spacer
gagaacatcgaccaggtgcatct

SEQ ID NO: 113 - DNA, 2163 bp, Brassica juncea
atgacaatgatgatgatgagccttaccacatcgttaccgtacccttttcaaatcctactagtctttatcttgtccatagcatccatcactttgcttggccgaatactatcaagacccacaaaaaccaaagaccggtctcgtcagcttcctcctggaccaccaggatggcccatcctcggcaatttacccgaactaatgaagactcgtcctaggcacaaatatttcgaaattgccacgaaagggcaaaaaccggagatcgcgtgtttcaacttcgccggaacacacaccatcatcataaactcggatgagatcgctcgagaagcgtttaaagagcgagacgccgacttcgcagaccggccaaatactttcaacatgagaaccatcggaggcaatcacaaatcaatggggaacacacccaccggtgaacagttcatgaaaatgaaaagagtgatcacatcggagattatgtccgtgaaaacattaaacatgttggtagctgccagaaacattgaagcggacaacctccttgcttaccttctctcgatttataaacggtccgagacagccgacgttagagagatctcgaggaattatggttacgctgtgacaatgagaatgatgtttggaaggagacatgtcacgaaagaaaatgttttctccgacgagggaaggttaggaccagcggagaaagatcatcttgatgcgattttcgaaacgttaaactgtttgccgagtttctctccggctgattacttggaaaaatggtttctcggctggaacgttgatggtctagaggagagggtgacagtgaactgtaataaagtccgcagttacaacaatccgatcattgacgagagggtggagttatggagagagaaaggtggtaaggcagctgttgaagattggattgatacgttcattaccctaaaagatgaaaacggaaagtattatatcacgccggatgaagtcaaaggtcaatgcgttgtaagtgaacactagtagtattttactactataattgattatatatcataagacagttacaagatattattacaaaatattatgatcatcgacagtatagatatactactgatattattgaaaatggcattgcggatagttttacatgttttttgtttcaaaagaaatatatcaacaaaaaattaatatttagattttttttgttatatgaagaatcaacttttattaattgttttaggaccccgttaaatatattgtttggtgttttatttcaggaattttgcatagcagcgatcgataatccggcaaataacatggaatggacacttgcggaaatgttaaagaacccggagattctcaaaaaagctttgaaggagttagacaaagtggtgggaagagacaggcttgttcaggaatctgacataccaaacctaaactacttaaaagcttgttgcagagaaacattcagggttcacccaagtgctcattatgtccctactcatgtggctcgtcgagatagcaccctcggaggttatttcattcccaaaggtaaaacaacaaaaattgtgtagtaactcaagactttacatttttacaatagcaaagcttatgcatagttagattgtaacaatatttgcgacgattaaaattctaccaaacgtattcaaaatttggatcatgcatctaaccatatacaaagtaatcttgttgattttgtttagattcatgactggtttttgatgatgcgtgcaaatactccaccagtagttttgtatgatgcgtgtattaaaaaagtatttgttttggacaggtagccacattcacgtcgcccgtcctggaataggccggagctccaaagtatggaaagatccattggtatacaaaccggagcgtcacctcgaaggaaatggaatctcgaaggagctttctctggtcgaaaatgaaatgcgtttggtgtcgtttggtaccggtcggcgtggctgcatcggtgtgaaagtcgggacgatcatgatggttataatgttggctaggtttcttcaagcgtttaactggaaactccatcctagttatggaccgttaagtctagaggaagatgatgcattgcttatggctaagcctcttctcttgtccgttgagccacgcttggcacccaacctttacccaaaattctacccttga

SEQ ID NO: 114 - DNA, 1626 bp, Brassica juncea
atgacaatgatgatgatgagccttaccacatcgttaccgtacccttttcaaatcctactagtctttatcttgtccatagcatccatcactttgcttggccgaatactatcaagacccacaaaaaccaaagaccggtctcgtcagcttcctcctggaccaccaggatggcccatcctcggcaatttacccgaactaatgaagactcgtcctaggcacaaatatttcgaaattgccacgaaagggcaaaaaccggagatcgcgtgtttcaacttcgccggaacacacaccatcatcataaactcggatgagatcgctcgagaagcgtttaaagagcgagacgccgacttcgcagaccggccaaatactttcaacatgagaaccatcggaggcaatcacaaatcaatggggaacacacccaccggtgaacagttcatgaaaatgaaaagagtgatcacatcggagattatgtccgtgaaaacattaaacatgttggtagctgccagaaacattgaagcggacaacctccttgcttaccttctctcgatttataaacggtccgagacagccgacgttagagagatctcgaggaattatggttacgctgtgacaatgagaatgatgtttggaaggagacatgtcacgaaagaaaatgttttctccgacgagggaaggttaggaccagcggagaaagatcatcttgatgcgattttcgaaacgttaaactgtttgccgagtttctctccggctgattacttggaaaaatggtttctcggctggaacgttgatggtctagaggagagggtgacagtgaactgtaataaagtccgcagttacaacaatccgatcattgacgagagggtggagttatggagagagaaaggtggtaaggcagctgttgaagattggattgatacgttcattaccctaaaagatgaaaacggaaagtattatatcacgccggatgaagtcaaaggtcaatgcgttgaattttgcatagcagcgatcgataatccggcaaataacatggaatggacacttgcggaaatgttaaagaacccggagattctcaaaaaagctttgaaggagttagacaaagtggtgggaagagacaggcttgttcaggaatctgacataccaaacctaaactacttaaaagcttgttgcagagaaacattcagggttcacccaagtgctcattatgtccctactcatgtggctcgtcgagatagcaccctcggaggttatttcattcccaaaggtagccacattcacgtcgcccgtcctggaataggccggagctccaaagtatggaaagatccattggtatacaaaccggagcgtcacctcgaaggaaatggaatctcgaaggagctttctctggtcgaaaatgaaatgcgtttggtgtcgtttggtaccggtcggcgtggctgcatcggtgtgaaagtcgggacgatcatgatggttataatgttggctaggtttcttcaagcgtttaactggaaactccatcctagttatggaccgttaagtctagaggaagatgatgcattgcttatggctaagcctcttctcttgtccgttgagccacgcttggcacccaacctttacccaaaattctacccttga

SEQ ID NO: 115 - protein, 541 aa, Brassica juncea
MTMMMMSLTTSLPYPFQILLVFILSIASITLLGRILSRPTKTKDRSRQLPPGPPGWPILGNLPELMKTRPRHKYFEIATKGQKPEIACFNFAGTHTIIINSDEIAREAFKERDADFADRPNTFNMRTIGGNHKSMGNTPTGEQFMKMKRVITSEIMSVKTLNMLVAARNIEADNLLAYLLSIYKRSETADVREISRNYGYAVTMRMMFGRRHVTKENVFSDEGRLGPAEKDHLDAIFETLNCLPSFSPADYLEKWFLGWNVDGLEERVTVNCNKVRSYNNPIIDERVELWREKGGKAAVEDWIDTFITLKDENGKYYITPDEVKGQCVEFCIAAIDNPANNMEWTLAEMLKNPEILKKALKELDKVVGRDRLVQESDIPNLNYLKACCRETFRVHPSAHYVPTHVARRDSTLGGYFIPKGSHIHVARPGIGRSSKVWKDPLVYKPERHLEGNGISKELSLVENEMRLVSFGTGRRGCIGVKVGTIMMVIMLARFLQAFNWKLHPSYGPLSLEEDDALLMAKPLLLSVEPRLAPNLYPKFYP

SEQ ID NO: 116 - DNA, 23 bp, Artificial
  spacer
aaaagggtacggtaacgatgtgg

SEQ ID NO: 117 - DNA, 23 bp, Artificial
  spacer
aaatcctactagtctttatcttg

SEQ ID NO: 118 - DNA, 2558 bp, Brassica juncea
atgggttcagacagtactccccaacttccagtgatctatctctcggaccaaaccctaaaaccaggaagtgagaagtgggttgaagtgaggaatgatgtccgtaaagctcttgaagactacggagctttcgaggtgtcatatgatagagtgtcagaggagctaaagcaatcggttttggaagccatgaaagagcttttcgagttaccagttgaggctaaacggaggaacgtgtctccaaaaccctacactggatactcgactcataatggtctttccgagagtttggggatccaggatgccgaggttttggagaaagttaacgaatttactcaactgctacgccctgattttgagggtaacaagagtatcaggtaaggttatgttatgtgaacagcacgatattgctcaatgtgcaagaaatcgctaagcggtaattatgtgatttaaatgagattagtgcataggcaacataccatctagacagatatttttaacaatcaacagagaaaatcgtttcatagtgtatgtctgatactctgatttgtgcataaactgcgtaggccaattttaaaacacaaggattgcttcacaaagtaacttgttcgtaaaccctgttgatttctttatcaaatatattgttcgtaagtttttgttaattgcttctatataaaacaagaatatttgtttcttacataatacgttcacgcgttttgtttttgttttgttcttctcttttttattaaaatgtttaaagaaatttctttttgttgaaaacagcgaaacaatccagaagttttcagagaagctagcagaattggatgtaatggtgagaagaatggttatggagagctttgggatagagaagtactttgatgaacacctcaagtcaacgaattaccgtctgcgactgatgaagtatatagcacctcctgatgttgatactaatgttgcagcgggtgctaatgatgctggtgatggttctaatgatgctggtgctagtgataatgccaatgttgttgctgatactagtgatattgctagtggtattgctaatgttcatattaatgatgacgccaatattggtgctacggctaatggcgacattggtgctgatgttgatgctaaaactagtgattttgctagtgttgagtctaaagccgacgttagtaccaatgttaatgctaatgctgatgccaatgctaatactggtactctcagtagtgctggtgttggtgatagtgttacagctaatggtggtgctgatgatgaggagaagaaattgggtttaccttctcatactgataaaaatcttttcactgtgctttatcaatatgagattgaaggtttggaggtgttaaccaaagatgaaaagtggatcagactgaaaccatctcataactctttcgttgttatggctggagattctgtatatgtaagttaacttcttctttctttttatgagatgacatgcacatgtaaaatattaaccgctcctcattatattcatgattttatagcataaatatttcataatttacttttatattcttttcctttgaatgaaaactaagaacttttacttttatattcaaaaacctaaacccaaacgaatttttttttactgtttcatagtattatttcaaactatgaaaattcagagactatatatatatatatatatatatatatatatatatatatatatatatatatatactgatatgtgatagttacaaaagtaaatccaccttataacttttgatgtttttttattgagtatttgcttcgtaaacgttgatgatctgtgatctctttttcctttttggtaagtatgatttgtgatctcttcaaaagttttaaggtttttgatatggttgtgcatgattacataggctatctaccagaactaaattgagacagaaaacgtgttggaataatagaaagtaacccatcttttaaaattagaagtcgaggaagaaaaaactaaaagaaaaaaaaaactagcggagaaaaaggttcaattcactttccactaaggtgaccaaccaattcctctctctacaaacaaatgtcttatgattctatttgctcttgttcactctcactagtcacgagtgttaggggaccaaccaaatcttatagcaactgatgttttatttgctcttatcacttttcactacaagcgcatgtcttggcttacatcatatgttttttttcttctgatcatgaccttgctcttgacaaaaataaaagtaacagtgatttacttggtgatgtttttgtctttttgtttgcaggcacttatgaatggtagactatttcgtccttttcatcgagtgagagtaacagagaaaaagaagacaagatattcaatagcattgttctcgactccaaacgcaggctacatcatagaaccaccaaaagaacttgtggacgaaaagcatccacgagtcttcaaaccattcacttatgttgacttgatgagtttctatcacactgagggtggtcgtagagctcgttctactcttcatgcttattgcgccgtctctgaagcatga

SEQ ID NO: 119 - DNA, 5632 bp, Brassica juncea
ggatatgcaccaaaggaaagaagaatgggttcagacagtactcctcaacttccagtcatccatctctcggaccaaaccctaaaaccaggaagtgagaagtgggttgaagtgaggagtgatgtccgtaaagctcttgaagactacggcgcgttcgaggtgtcatatgatagagtgtcagaggagcttaaggaatcggttttggaagccatgaaagagcttttccagctacctgttgaggccaaaagaagaaacgtgtctcccaaaccctacactggatatatgactcataatggtatttccgagagtctggggatccaggatgccaatgttttggagaaagttaacgaatttactcaactgctacgccctgattgtgagggtaacaagagtaccaggtccgtattgttatgaacttcatagagtaaaagggaaaattaatctcttagataacaaaaaaaaaaattgtaacaaaaaaacacccaattagaaccttaaactagcactaattaagagataaaataactaaattactccaaaccctaaacccttactctaatcacattttctaaatattaaaccttaaactataatcactaaactctaaactgtaaattctaatcactaaacccaaacacaaatataaaataaaaagaactaaaacttttaattaatgatattttgaaaaaaatttcccttactattttctatcaaaaagattagggctgttcaatatggtaaaaccgaaccgtaccgaaccgaaccgaaccgaaatagacaatatggtttggttttggtatatactatataaaccgaatggatataattttataaaaaycgtaggatttggatatggtttggtatataactgattaaaccgaataaaccgaacaaaaccgattaaaagtagaaacatgtaaatatgtatctattttataacaatacatgaaaatctatttgttacataagttaaatttgtgttaataactattaccataattttatagtaataaaaaaccttaatttgtaaaacacttgaaatataactaaataaccatacatcgcaattcagacatcttattttctaagtttttcttgatatttttgctttattttagtctttactaaattaatatgaagattataaatttgagggacaataattaatggaaaattttcaattgaaaaagcatgactttaatgaacactaaatatagaagagtgaaaaaacttttctttcatgtttctattttgtttcatatttttattttcaaaatttcaaattttgattttagttatagattttattattttatttgatggtagaagcatttttacttttttgttcatttatttgaacatgtaatatatttttaataaaggattgtgttaagaatatgactctaaaattcatataatctagattttgacccgcgcaggcgcgcgggtgtatattttgaaaaatatgtgatatttgtttttcatgtaattattaggattggaaaaatgaatccgaggaacataaccgataccgatccaaagatatagtaccaaacccaaacataaattgattaaatattctaattattcaaaattttgttatttagagaaccgaatctgatccgaaccgaagtatttgggtatccgaatttatctaaaaatagatttatatacttatatatattaatatttttagatttaacgtatataaaacatcaaaaatgatacttttaaattggtttaaatacttgaaaatatatatagatagtcaaaagtaaatatctgaaatagttaaagtatactcaaatcaccaaaaatacttaaaataattattgatttcgtatccaaaattttaaatcaagccaattgatatgttaagcttaagtattatgacatatgttattcaaatttatacgtaatatattattttatttataacatttgagaaatttaaaatatataatgatttaagactttaaaaataatttaaattagttatccaaacccaaaccaaacccgcaaagatccaaatcgaactcaaaccaaaatttagaaacattctaataaggctgaaatctttgaccccgaaaactcaaaatacaaaccgatcagaactaaacccgtatgggtatcaaaagcccatccctagtcattattatatatcgtattttatcatcatataattaatcgtattttatatgtaccatcatataagtaatcatataattaatagtattttatacataccatcatataaataattacatatattatatttttaaaacttaatatgaaatatgaaaaccataatttgagttggtatttcaaattgggctttgtattatatttttcttatatatattgacaatatttttttataatggttattgaaaaatagtttagtaaaaatccatttttgaatatatgtatatttttgaatcaatttttgatataaatcaaatttgaattattattttgatttgaaatatgtatataaagtttaaattttgttttatggttagtttagaaaaaaaaattttagggaattagattgacccattttggtatattttaaaagtggcctagataactttcaattttttaaaaaaacataagcccattacttttttttcttaatactactatccttgttttcaaacaaaaatattttttttaaaagactgcaatccatgtttccaaacactccaaatttttaaaagtcctattcaagtctccaaacactccaattttgtacttgagttttaataagatagatgatctcaaacaaaataattatgttttttggtataaaaccgaataaaccgaaaaccgacggtatataaaccgaaccgaaccgaagtaaatatggatttagaatggtaatcatattttactaaccgaaataccgaaaaccgaaaaaaaccgaaccgaaaccgaaccgatatccggattgaacacccctaaaaaagatgttttagtgatatctttgggtatttctggaaagtaaattgtacgtaaattcttgttagtattatcgaatatattgttcctaggatttcgttaatttcttctagttagagcatgttatatatttttccgctcaaaatagtattatttgtgtagttcagacaagtgacaatttttttttctgtctacatagaaaacttgatttttatatattgttccgtagagaaaatgctagttcactcagatatgaaaccaatgacttaaattttttaatttcatagtatacgttcttgcgtttttgttttgttgttttcttctcttgtatctattcaaattgctcaaagaaatttctgtcttgaaaacagcgaaaggatacataagttttcagagaagatggcagaattggatgtaatggtgagaagaatggtatttgagagctttgggatagaggattactttgatgagaacctcaagtcaatgaattaccgtctacgactgatgaagtattcagcaccacgtgatgttgatacgaatgttgcggcaggtgctaatgatgctggtgatgctgctaatacgaataacaatggtaatactggtgcggatgttggtgctggcgattcagccagtactggtgacaatgacaaggttgttgctagtgatgatgctaatgctggtgctgatactaatgatattgttgttggtattgctaacgttcatattgatgatgatgctaatgatgttgctaaagctaatggcgacgttggtgctggtgttgatgctaatactaatgattgtgctagtgttaagtctagcgccgacgttgataatgttaatgctaatgtcagtgttggtactaatggtgatactaatgctaatgttggcgctgatattgaggagaagaaattaggcttaccttctcatactgataaaaaccttttgacagtactttatcaatatgagattgaaggtttggaggtgttaaccaaagatgaaaagtggatcagagtgaagccatctcataacactttcgttgttatcgctggagattctctacatgtaagttaactcctttttaaatggcatgcatgcataaaatattaactcctcatattaatcaagattttatgacatacttatggaataatttaccctttaatattctaaattaatcaagccaaatcttttttactgtttcgtagtattatttgaaaactattgaaattcagagcctatacatacagatattaattgatatgtacatagttacaaaagtaaatacaccttatcgattttgatgttatttgctttctaaacattgatgattgccgacaaaaaaaaacattgatgatttgtgatctgtccaaaagttttaaggttttgctataattgtgcacgaattgatcatctagccttcaaaaaaaaaacatagattatctaaactaactgaattacagatagagaaattaaagtattatagtaatggaatgtaactaaattagtggaagaaaaaaaagaaaaatattatttaattcacgttcactctttctctacgaactaatattttatgatttcatacttttatgtgctcatgtttactctctcattcacaggggccaggagaccaaccaaacatataacaatattaaaactataaacgtatctctattttttcttataatataattttgtaaatagaaacaaatttttactctaatatatttttctataataaaaaaatattatattttcatactttagaaatactgttttcatctctatatttaaaaataataaatagcatttccttattgtagagaaaatatagcatctatatactaaagatgaacgcatttgagtaaaaattcattgttatttttaaaaaattatattataaatttttttttaaaaacattaacatcaaaattttctcagaatttatcaacattaaaatagccaaaagaataaaaatagaaaaaaagaatgtgggaaagaaagaaaaaatgtaagaaaaaaaactttctttgaaaaaactatgagagacacaaatcacatgtgtcagtatgtaagtattcatatttattctatgtttaaaatttaattatataataaaattatactgctgacaaaaaaagtatactaatattaaaaattgagatatacaccttaaaaattataccaatgatgatcgctctaatgtcttatgatttatttgctcttgtcactttcactttcagtccagttagacaattagtgcatgtctatacaccatgttttgcttactttctatttgacgaagttaattatttcatttttaatgtttattttcttctgatcatgatcttggtgttacacaaaaataagtactaatgatgtacttggcgatgtatatgttttttgattgcaggcacttatgaatggtagactatttctcccgtttcatcgagtaagagtgacggagaaaaagaagacaagatattcaataggattgttctcgactccaaatagagattacatcatagaaccaccaaaggaacttgtggacgagcagcatccacgtgtattcaaaccattaacttacgttgacttaatgagcttctatcacactgaggttggccgtagagctcgatctactctgcatgcctattgtgccgtctccggagcttaaatg

SEQ ID NO: 120 - DNA, 1781 bp, Brassica juncea
atgggtgcagacactcctcaacttccagtcatctatctctcggaccaaaccctaaaaccaggaagtgagaagtgggttgaagtgaggagtgatgtccgtaaagctcttgaagactacggcggttttgaggtgtcatatgatagagtgtcagaggagctgaagaagtcagttttggatgccatgatagagcttttcgagttaccagttgaggctaaacagagaaacgtgtctccgaaaccgtacactggatattcaactcataatggtctctctgagagtctagggatccaggattccaatgttttggagaaagttaacgaatttactcaactgctacgccctgattgtgagggtaacaagactatgaggtaacgtcatgtcaaaaaaaaaaaactaagtaatgcttcgtagagtatattgttcgtaaactcctgttattttttcatcaaaaatattttcgtaatttttttgttagttgcttttataagctatgtaacaattttctatataaaaccttgtttttatttttattttttttggaaaaatgtcagttcacttatatagtaatgaactgaaaatttgttttcaatctcacgtttctcgcattttattttcttgtttctattaaaatagctatataattttctttgtgttgaaaacagcgaaacgatccagaatttttcagagaagttagcagaattggatgtaatggtgagaagaatggtcatagagagctttgggatagaaaactactttgatgaacacctcaagtcaacgaattaccgtttgcgactgatgaaatatgtagcaccacctgatgttgatgctaatgttgcggttggtactaaagattctgatgatggtgctaatacgaatacaactgctaacgctgatgctgatgatattgctaatggtattgctaaagttcatattgatgacgatgctgatgccaagggtgacgtttgcactggtgctggtaccaatcataatggtgatgacgttaatactggtgattgtgctaatgttaagtctaatgtcgacgttggtactaatgttagtgctaaatctagtgttggtgctgatgttaacactggcactattgatgatgttaatgctaatgctggtactcgtagtagtgctaatgttggcgttagtgatagtgttaaagctaatggtggcgcagatgatgaggagaagaaattaggtctaccttctcatactgataaaaaccttttgacggtactttatcaatatgagattgaaggtttggaggtgttaaccaaagatgaaaagtggatcaggttaaaaccatctcataactctttcgttgttatggctggagattctctatatgtaagttctaacttattttatttttaaatgggatgcacctttttattttttcctatcactttcacaaatgcatgtcttttctttactaaagtgtttatacattaacattatatgttttcttctcatcatgaaacttgttttgatttttgtattatttttgtttgcaggcacttatgaatggtagactgtctcgtccgtttcatagagtaagagtaacggaaagaaagaagacaaggtattcaatagcattgttctcgactccaaacggagattacatcatcgaaccaccaaaagagcttgtggacgagaagcacccacgtctcttcaaaccattcacttacgttgacttgatgagtttctatcacactgaggctggtcgtagagctcgttctactcttcacgcttattgtgccgtctctggagcataa

SEQ ID NO: 121 - DNA, 4049 bp, Brassica juncea
atgggttcagacagtactcctcaacttccagtgatctatctctcggaccaaaccctaaaaccaggaagtgagaagtgggttgaagtgaggagtgatgtccgtaaagctcttgaagactacggcgctttcgaggtgtcatatgatagagtgtcagaggagcttaaggaatcggttttggaagccatgaaagagcttttcgacttaccagttgaggctaagcagagaaacgtgtctccaaaaccctacactggatattctactcataatggtctctccgagagtctagggatccaggatgctgaggttttggagaaagttaacgagtttactcaactgctacgtcctgattgtgagggtaacaagagtatcaggtaaggttatgttatgtgaaaagaacaatattgcttatgatgtgcaggaaatcgttaagcggtaattaagcgatgtaaatggaactagttcctaggcgtcatatagaccaatatttttaacaatcgatatagaaaatcattcgtagtctatggctgattttccgtatagactacctagaccgagttttacaacacaactagattttgacccgcaaatccttgtggatattttcattttataaatgtataattttgatatatcctaagttttctagttttttttgtcatcaaaatgttgtaaatatatgatttatattttaatattatatattttgtaactctataatcttattggttaagttttttattcgacattattcatatataatgatttgctttatacattttacatttgttatataattttattatttttcaatcgttcataaataaattcataatttgaaataatcaaatagagaatctccttcaattttatatattgcatgcataatatcattttaaaattttatttagttatactatagaaatgatatattgtttaggataatttatattatcatattgtgtttaaaaaatatactttaacatatattattttagtatttactgcagatttataagtaaatacattgtttaatttaaagtaattaacacgtattattttaataaattttatacatagagccatctatcatacttatcttgtaattttattcgtatatgatatattttggatgtttatgatattaattttttgattaattaaattaagacttcaaaatattagattactttaatttttataacatagtttgttttttcgtgttacatttcaaaaagttattctttattatctatgattataccttcagaaaaatttaaaacattatcattttaagtttgcatacttattttttaaattttatattttgtcaaattgtttggaaaattacacaactatatttgaggtgggagattatatgatttttgaaatttgtttgttgctaaattaatacattatttttatataaataatattaatttggtaagattattttcttaaatattttttataatttaatgtaaaattaaaatttctatttaaatttgatttttcgttaaattttagaatgaattattaaaatttcatagttttctaataacatatttttaaatagttatgactaaagttattatttattatattgataaacattataaaaatatattgttgggagtttcaaaataaataaaaggatatatatgttgagatataaaattttaacactatgttaataaatttatttttgtataaaatattattagttagatgttaaccattttaatgataatgataatttattaaatgaaataatttaataaaaacttaattactatgaatataattgtcatatttaattcactatctcaattcatttttatataatacataatataatatagaatactataaaataatcgtataaatttatattttcttttgttttatgaataaaattttattaacattagatttgtaactaatattttattactaattacgaaattaattaatatgttattttataaaaatatttaaatttagtaagattttgttacattctttttcaagatattttaaaattcaattttatagttggtttattattaatgtaaataatcaaatatgtcacattacctaatttataaatggtcctactatgatttgtttatgatagataaaatataggaccctaaattaatagattagattattgcttcacaatgtaacctgttcgtaaatcttgttgatttctttaccaaatatattgttcgtaagtttttgctaattgcttctatttaaagcaataatttttgtttcttatagtatgttctcacgttttgtttttgtcttttttctcttttttaaaagtgtttaaagcaatttctttgtgttgaaaacagcgaaacaatccagaagttttcagagaagttagcagaattggatgtaatggtgagaagaatggttatggagagctttgggatagagaagtactttgatgaacacctcaagtcaacaaattaccgtctgcgactgatgaagtatatagcaccacctgaagttgatactaatgttgcggtgggtgctaatgatgctggtgatggtgctaatgatgcaagtgctagtgataaggccaatgttgttgctggggatgaagataatgttggtgctgatactagtgatattgctaatggtatagctaatgttcatattgatgatgacgctaaggctaatggcgacattggtgctgatgttgatgctaaaactagtgattgtgctaatgttgagtctaaagccgatgttagtaccgatgttaatgccaattctgattccaatgctaatactggtactcttagtagtgctagtgttggtgatattgttaaagctaatggtggtgctgatgatgaggagaagaaattaggtttaccttctcatactgataaaaatcttttcacggtgctttatcaatatgagattgaaggtttggaggtgttaaccaaagatgaaaagtggataagattgaaaccatctcataactctttcgttgttatggctggagattccgcatatgtaagttaacttcttctcctttttttaagacgacatgcagacgtaaaatattaacattcaccattgcattcatgattctatgtcccataatttacttttatattatttttaatgaaaaataagaatttttacttttatattataaaaaaaatcaaactaaattgtttttactgtttcattatattatttgaaactattaaaattcagagcctatatatatatatatatataacatttgatgtaattttctttctacacgttgatgatttgagatctctccaaaagttttaatgtttgatatggttatgcatgattacatagtctatctactagaactaaattgagacagagaaagtgttggaataatagaaagtaatccatcttttaaaattagaagtcgaggaagaaaaaacttttttaaaaaactagtggagaaaagaaaaagatgatttcaattcacttttactaaggtgaccaaccaaatttgctctcgacaaactaatttcttatgattctaattcctcttgttcactctcactagtcactagggttagggaccaaccaaatcttatagcaactaatgtttttttttgctcttatcgctttcgctagcaagcgtatatgtcttggcaatacaccatgtgtttcttttctcctgatcatgacctttctcttaacaaaggataaagtaacaattttaccaaaaaaaaggataaagtaacgatgatgtacctggtgattttttgtcattttgtttgcaggcacttatgaatggtagactttttcgtccgtttcatcgagtaagagtaacggagaaaaagaagacaagatattcaatagcattattctcaactccaaacgcaggtaacatcatagaaccaccaaaagaacttgtggacgagaagcatccacgagtcttcaaaccattcacttatgttgacttgatgagtttctatcacactgaggctggtcgtagagctcgatctactcttcatgcttattgtgccgtctccgaagcatga

SEQ ID NO: 122 - DNA, 1808 bp, Brassica juncea
atgggtgcagacactcctcaacttccagtcatctatctctcggaccaaaccctgaaaccaggaagtgagaagtgggctgaagtcaggagtggtgtccgtaaagctctcgaagaatatggtgctttcgaggtgtcatatgatagagtgacagaggagcttaagaagtcagttttggatgccatgatagagcttttcgagttaccagttgaggctaaacagagaaacgtgtctccgaaaccctacatgggatattcgactcataatggtctctctgagagtctagggatccaggatcccaatgttttggagaaagttaacgaatttactcaactgctacgccctgattgtgagggtaacaagagtatgaggtaactgtcatgtcaagaaaaactcaataatgctccgtataataaattgttcgtaaactattgttaattttagtcaaatgtatttttgtaatttttttagttgcttttataagttatgcgacaattttctatatgaaaccttgttttatttatttttttgtgtggaaaacatgtcaggttcactcatatagcaatgaactgatattttgtttcaatcacacgtttctcgcattttattttcttgtttctataaaatagctatactaattttctttctattgaaaacagcgaaacaatccagaagttttcagagaagttagtagaattggatgtaactgtgaaaagaatggtcatacagagctttgggatagagaactactttgatgaacacctcaagtcattgaagaattaccgtatgcgactgatgaagtacgtagcaccacctgatgttgatgctaaagatgctgatgatggtgccaatacgaatctgaatgctaacgctgatgcggatgctggtgctggtgatattgctaatggtattgctaatgttcatattgatgaagatgttaatgccaagggtgacgttggcactggtggtggtgatgctaatcataatggtgatgatgctaatactggtgattctgctagtgtaaagtcgaatgttgacgttggtactgatgttaatgttaaagctagtgttggtgctgatgttaacgttggcactattgctgatgctaatgctaatattggtactcttagtagtgctaatgttggcgttggggatagtgttaaagctaatggtggcgctgatgatgaggagaagaaattaggtttaccttctcatactgataaaaacctcttgacggtactttatcaatatgagattgatggtttggaggtgttgaccaaagatgaaaagtggatcaggttgaaaccagctcacaactctttcgttgttatagctggagattctctatatgtaagttttaacttattttttatttttaaatgacatgcaccgtaatatattaattgcgatcctataataatcaagactttttatttgctcttataactaattcacaagtgcatgtttttactaaagcgttatatacatcattttatgttttcttctgatcataaatcttgtgttgatgtttttattatttttgtgtgcaggcacttatgaatggtagactatctcgcccgtttcatagagtaagggtaacagaaagaaagaagacaaggtattcaatagcattgttctcggctccagacggagattacatcatcgaaccaccaaaagagcttgtggacgagaagcacccacgtctcttcaaaccattcacatatgctgacttgatgagtttctatcacactgaagctggtcgtagatctcgttctactcttgacgcttattctgctgtctctggagcataa

SEQ ID NO: 123 - DNA, 1287 bp, Brassica juncea
atgggttcagacagtactccccaacttccagtgatctatctctcggaccaaaccctaaaaccaggaagtgagaagtgggttgaagtgaggaatgatgtccgtaaagctcttgaagactacggagctttcgaggtgtcatatgatagagtgtcagaggagctaaagcaatcggttttggaagccatgaaagagcttttcgagttaccagttgaggctaaacggaggaacgtgtctccaaaaccctacactggatactcgactcataatggtctttccgagagtttggggatccaggatgccgaggttttggagaaagttaacgaatttactcaactgctacgccctgattttgagggtaacaagagtatcagcgaaacaatccagaagttttcagagaagctagcagaattggatgtaatggtgagaagaatggttatggagagctttgggatagagaagtactttgatgaacacctcaagtcaacgaattaccgtctgcgactgatgaagtatatagcacctcctgatgttgatactaatgttgcagcgggtgctaatgatgctggtgatggttctaatgatgctggtgctagtgataatgccaatgttgttgctgatactagtgatattgctagtggtattgctaatgttcatattaatgatgacgccaatattggtgctacggctaatggcgacattggtgctgatgttgatgctaaaactagtgattttgctagtgttgagtctaaagccgacgttagtaccaatgttaatgctaatgctgatgccaatgctaatactggtactctcagtagtgctggtgttggtgatagtgttacagctaatggtggtgctgatgatgaggagaagaaattgggtttaccttctcatactgataaaaatcttttcactgtgctttatcaatatgagattgaaggtttggaggtgttaaccaaagatgaaaagtggatcagactgaaaccatctcataactctttcgttgttatggctggagattctgtatatgcacttatgaatggtagactatttcgtccttttcatcgagtgagagtaacagagaaaaagaagacaagatattcaatagcattgttctcgactccaaacgcaggctacatcatagaaccaccaaaagaacttgtggacgaaaagcatccacgagtcttcaaaccattcacttatgttgacttgatgagtttctatcacactgagggtggtcgtagagctcgttctactcttcatgcttattgcgccgtctctgaagcatga

SEQ ID NO: 124 - DNA, 1308 bp, Brassica juncea
atggcagaattggatgtaatggtgagaagaatggtatttgagagctttgggatagaggattactttgatgagaacctcaagtcaatgaattaccgtctacgactgatgaagtattcagcaccacgtgatgttgatacgaatgttgcggcaggtgctaatgatgctggtgatgctgctaatacgaataacaatggtaatactggtgcggatgttggtgctggcgattcagccagtactggtgacaatgacaaggttgttgctagtgatgatgctaatgctggtgctgatactaatgatattgttgttggtattgctaacgttcatattgatgatgatgctaatgatgttgctaaagctaatggcgacgttggtgctggtgttgatgctaatactaatgattgtgctagtgttaagtctagcgccgacgttgataatgttaatgctaatgtcagtgttggtactaatggtgatactaatgctaatgttggcgctgatattgaggagaagaaattaggcttaccttctcatactgataaaaaccttttgacagtactttatcaatatgagattgaaggtttggaggtgttaaccaaagatgaaaagtggatcagagtgaagccatctcataacactttcgttgttatcgctggagattctctacatgcacttatgaatggtagactatttctcccgtttcatcgagtaagagtgacggagaaaaagaagacaagatattcaataggattgttctcgactccaaatagagattacatcatagaaccaccaaaggaacttgtggacgagcagcatccacgtgtattcaaaccattaacttacgttgacttaatgagcttctatcacactgaggttggccgtagagctcgatctactctgcatgcctattgtgccgtctccggagcttaaatgggttcagacagtactcctcaacttccagtcatccatctctcggaccaaaccctaaaaccaggaagtgagaagtgggttgaagtgaggagtgatgtccgtaaagctcttgaagactacggcgcgttcgaggtgtcatatgatagagtgtcagaggagcttaaggaatcggttttggaagccatgaaagagcttttccagctacctgttgaggccaaaagaagaaacgtgtctcccaaaccctacactggatatatgactcataatggtatttccgagagtctggggatccaggatgccaatgttttggagaaagttaacgaatttactcaactgctacgccctgattgtgagggtaacaagagtaccaggtccgtattgtta

SEQ ID NO: 125 - DNA, 1320 bp, Brassica juncea
atgggtgcagacactcctcaacttccagtcatctatctctcggaccaaaccctaaaaccaggaagtgagaagtgggttgaagtgaggagtgatgtccgtaaagctcttgaagactacggcggttttgaggtgtcatatgatagagtgtcagaggagctgaagaagtcagttttggatgccatgatagagcttttcgagttaccagttgaggctaaacagagaaacgtgtctccgaaaccgtacactggatattcaactcataatggtctctctgagagtctagggatccaggattccaatgttttggagaaagttaacgaatttactcaactgctacgccctgattgtgagggtaacaagactatgagcgaaacgatccagaatttttcagagaagttagcagaattggatgtaatggtgagaagaatggtcatagagagctttgggatagaaaactactttgatgaacacctcaagtcaacgaattaccgtttgcgactgatgaaatatgtagcaccacctgatgttgatgctaatgttgcggttggtactaaagattctgatgatggtgctaatacgaatacaactgctaacgctgatgctgatgatattgctaatggtattgctaaagttcatattgatgacgatgctgatgccaagggtgacgtttgcactggtgctggtaccaatcataatggtgatgacgttaatactggtgattgtgctaatgttaagtctaatgtcgacgttggtactaatgttagtgctaaatctagtgttggtgctgatgttaacactggcactattgatgatgttaatgctaatgctggtactcgtagtagtgctaatgttggcgttagtgatagtgttaaagctaatggtggcgcagatgatgaggagaagaaattaggtctaccttctcatactgataaaaaccttttgacggtactttatcaatatgagattgaaggtttggaggtgttaaccaaagatgaaaagtggatcaggttaaaaccatctcataactctttcgttgttatggctggagattctctatatgcacttatgaatggtagactgtctcgtccgtttcatagagtaagagtaacggaaagaaagaagacaaggtattcaatagcattgttctcgactccaaacggagattacatcatcgaaccaccaaaagagcttgtggacgagaagcacccacgtctcttcaaaccattcacttacgttgacttgatgagtttctatcacactgaggctggtcgtagagctcgttctactcttcacgcttattgtgccgtctctggagcataa

SEQ ID NO: 126 - DNA, 1299 bp, Brassica juncea
atgggttcagacagtactcctcaacttccagtgatctatctctcggaccaaaccctaaaaccaggaagtgagaagtgggttgaagtgaggagtgatgtccgtaaagctcttgaagactacggcgctttcgaggtgtcatatgatagagtgtcagaggagcttaaggaatcggttttggaagccatgaaagagcttttcgacttaccagttgaggctaagcagagaaacgtgtctccaaaaccctacactggatattctactcataatggtctctccgagagtctagggatccaggatgctgaggttttggagaaagttaacgagtttactcaactgctacgtcctgattgtgagggtaacaagagtatcagggaaacaatccagaagttttcagagaagttagcagaattggatgtaatggtgagaagaatggttatggagagctttgggatagagaagtactttgatgaacacctcaagtcaacaaattaccgtctgcgactgatgaagtatatagcaccacctgaagttgatactaatgttgcggtgggtgctaatgatgctggtgatggtgctaatgatgcaagtgctagtgataaggccaatgttgttgctggggatgaagataatgttggtgctgatactagtgatattgctaatggtatagctaatgttcatattgatgatgacgctaaggctaatggcgacattggtgctgatgttgatgctaaaactagtgattgtgctaatgttgagtctaaagccgatgttagtaccgatgttaatgccaattctgattccaatgctaatactggtactcttagtagtgctagtgttggtgatattgttaaagctaatggtggtgctgatgatgaggagaagaaattaggtttaccttctcatactgataaaaatcttttcacggtgctttatcaatatgagattgaaggtttggaggtgttaaccaaagatgaaaagtggataagattgaaaccatctcataactctttcgttgttatggctggagattccgcatatgcacttatgaatggtagactttttcgtccgtttcatcgagtaagagtaacggagaaaaagaagacaagatattcaatagcattattctcaactccaaacgcaggtaacatcatagaaccaccaaaagaacttgtggacgagaagcatccacgagtcttcaaaccattcacttatgttgacttgatgagtttctatcacactgaggctggtcgtagagctcgatctactcttcatgcttattgtgccgtctccgaagcatga

SEQ ID NO: 127 - DNA, 1320 bp, Brassica juncea
atgggtgcagacactcctcaacttccagtcatctatctctcggaccaaaccctgaaaccaggaagtgagaagtgggctgaagtcaggagtggtgtccgtaaagctctcgaagaatatggtgctttcgaggtgtcatatgatagagtgacagaggagcttaagaagtcagttttggatgccatgatagagcttttcgagttaccagttgaggctaaacagagaaacgtgtctccgaaaccctacatgggatattcgactcataatggtctctctgagagtctagggatccaggatcccaatgttttggagaaagttaacgaatttactcaactgctacgccctgattgtgagggtaacaagagtatgagcgaaacaatccagaagttttcagagaagttagtagaattggatgtaactgtgaaaagaatggtcatacagagctttgggatagagaactactttgatgaacacctcaagtcattgaagaattaccgtatgcgactgatgaagtacgtagcaccacctgatgttgatgctaaagatgctgatgatggtgccaatacgaatctgaatgctaacgctgatgcggatgctggtgctggtgatattgctaatggtattgctaatgttcatattgatgaagatgttaatgccaagggtgacgttggcactggtggtggtgatgctaatcataatggtgatgatgctaatactggtgattctgctagtgtaaagtcgaatgttgacgttggtactgatgttaatgttaaagctagtgttggtgctgatgttaacgttggcactattgctgatgctaatgctaatattggtactcttagtagtgctaatgttggcgttggggatagtgttaaagctaatggtggcgctgatgatgaggagaagaaattaggtttaccttctcatactgataaaaacctcttgacggtactttatcaatatgagattgatggtttggaggtgttgaccaaagatgaaaagtggatcaggttgaaaccagctcacaactctttcgttgttatagctggagattctctatatgcacttatgaatggtagactatctcgcccgtttcatagagtaagggtaacagaaagaaagaagacaaggtattcaatagcattgttctcggctccagacggagattacatcatcgaaccaccaaaagagcttgtggacgagaagcacccacgtctcttcaaaccattcacatatgctgacttgatgagtttctatcacactgaagctggtcgtagatctcgttctactcttgacgcttattctgctgtctctggagcataa

SEQ ID NO: 128 - protein, 428 aa, Brassica juncea
MGSDSTPQLPVIYLSDQTLKPGSEKWVEVRNDVRKALEDYGAFEVSYDRVSEELKQSVLEAMKELFELPVEAKRRNVSPKPYTGYSTHNGLSESLGIQDAEVLEKVNEFTQLLRPDFEGNKSISETIQKFSEKLAELDVMVRRMVMESFGIEKYFDEHLKSTNYRLRLMKYIAPPDVDTNVAAGANDAGDGSNDAGASDNANVVADTSDIASGIANVHINDDANIGATANGDIGADVDAKTSDFASVESKADVSTNVNANADANANTGTLSSAGVGDSVTANGGADDEEKKLGLPSHTDKNLFTVLYQYEIEGLEVLTKDEKWIRLKPSHNSFVVMAGDSVYALMNGRLFRPFHRVRVTEKKKTRYSIALFSTPNAGYIIEPPKELVDEKHPRVFKPFTYVDLMSFYHTEGGRRARSTLHAYCAVSEA

SEQ ID NO: 129 - protein, 435 aa, Brassica juncea
MAELDVMVRRMVFESFGIEDYFDENLKSMNYRLRLMKYSAPRDVDTNVAAGANDAGDAANTNNNGNTGADVGAGDSASTGDNDKVVASDDANAGADTNDIVVGIANVHIDDDANDVAKANGDVGAGVDANTNDCASVKSSADVDNVNANVSVGTNGDTNANVGADIEEKKLGLPSHTDKNLLTVLYQYEIEGLEVLTKDEKWIRVKPSHNTFVVIAGDSLHALMNGRLFLPFHRVRVTEKKKTRYSIGLFSTPNRDYIIEPPKELVDEQHPRVFKPLTYVDLMSFYHTEVGRRARSTLHAYCAVSGAMGSDSTPQLPVIHLSDQTLKPGSEKWVEVRSDVRKALEDYGAFEVSYDRVSEELKESVLEAMKELFQLPVEAKRRNVSPKPYTGYMTHNGISESLGIQDANVLEKVNEFTQLLRPDCEGNKSTRSVLL

SEQ ID NO: 130 - protein, 439 aa, Brassica juncea
MGADTPQLPVIYLSDQTLKPGSEKWVEVRSDVRKALEDYGGFEVSYDRVSEELKKSVLDAMIELFELPVEAKQRNVSPKPYTGYSTHNGLSESLGIQDSNVLEKVNEFTQLLRPDCEGNKTMSETIQNFSEKLAELDVMVRRMVIESFGIENYFDEHLKSTNYRLRLMKYVAPPDVDANVAVGTKDSDDGANTNTTANADADDIANGIAKVHIDDDADAKGDVCTGAGTNHNGDDVNTGDCANVKSNVDVGTNVSAKSSVGADVNTGTIDDVNANAGTRSSANVGVSDSVKANGGADDEEKKLGLPSHTDKNLLTVLYQYEIEGLEVLTKDEKWIRLKPSHNSFVVMAGDSLYALMNGRLSRPFHRVRVTERKKTRYSIALFSTPNGDYIIEPPKELVDEKHPRLFKPFTYVDLMSFYHTEAGRRARSTLHAYCAVSGA

SEQ ID NO: 131 - protein, 432 aa, Brassica juncea
MGSDSTPQLPVIYLSDQTLKPGSEKWVEVRSDVRKALEDYGAFEVSYDRVSEELKESVLEAMKELFDLPVEAKQRNVSPKPYTGYSTHNGLSESLGIQDAEVLEKVNEFTQLLRPDCEGNKSIRETIQKFSEKLAELDVMVRRMVMESFGIEKYFDEHLKSTNYRLRLMKYIAPPEVDTNVAVGANDAGDGANDASASDKANVVAGDEDNVGADTSDIANGIANVHIDDDAKANGDIGADVDAKTSDCANVESKADVSTDVNANSDSNANTGTLSSASVGDIVKANGGADDEEKKLGLPSHTDKNLFTVLYQYEIEGLEVLTKDEKWIRLKPSHNSFVVMAGDSAYALMNGRLFRPFHRVRVTEKKKTRYSIALFSTPNAGNIIEPPKELVDEKHPRVFKPFTYVDLMSFYHTEAGRRARSTLHAYCAVSEA

SEQ ID NO: 132 - protein, 439 aa, Brassica juncea
MGADTPQLPVIYLSDQTLKPGSEKWAEVRSGVRKALEEYGAFEVSYDRVTEELKKSVLDAMIELFELPVEAKQRNVSPKPYMGYSTHNGLSESLGIQDPNVLEKVNEFTQLLRPDCEGNKSMSETIQKFSEKLVELDVTVKRMVIQSFGIENYFDEHLKSLKNYRMRLMKYVAPPDVDAKDADDGANTNLNANADADAGAGDIANGIANVHIDEDVNAKGDVGTGGGDANHNGDDANTGDSASVKSNVDVGTDVNVKASVGADVNVGTIADANANIGTLSSANVGVGDSVKANGGADDEEKKLGLPSHTDKNLLTVLYQYEIDGLEVLTKDEKWIRLKPAHNSFVVIAGDSLYALMNGRLSRPFHRVRVTERKKTRYSIALFSAPDGDYIIEPPKELVDEKHPRLFKPFTYADLMSFYHTEAGRRSRSTLDAYSAVSGA

SEQ ID NO: 133 - DNA, 23 bp, Artificial
  spacer
agggtttggtccgagagatagat

SEQ ID NO: 134 - DNA, 23 bp, Artificial
  spacer
gggtttggtccgagagatggatg

SEQ ID NO: 135 - DNA, 23 bp, Artificial
  spacer
gggtttggtccgagagatagatc

SEQ ID NO: 136 - DNA, 23 bp, Artificial
  spacer
gaggtgtcatatgatagagtgac

SEQ ID NO: 137 - DNA, 23 bp, Artificial
  spacer
gaggtgtcatatgatagagtgtc

SEQ ID NO: 138 - DNA, 23 bp, Artificial
  spacer
atggcttccaaaaccgattcctt

SEQ ID NO: 139 - DNA, 23 bp, Artificial
  spacer
agagaagatggcagaattggatg

SEQ ID NO: 140 - DNA, 23 bp, Artificial
  spacer
atgagaacctcaagtcaatgaat

SEQ ID NO: 141 - DNA, 191 bp, Artificial
  mutated myrosinase
tcttatattattaataagagaagaaaaagatggttaattttagttacatgaattactgaaatgattctatattaatatgcacagacaagatttcaaagattatgccgatatatgtttcaaagaatttggtggaaaggtaaagtcgatctttacaggaccaaatataaggtgaatgctgtctccatatgtga

SEQ ID NO: 142 - DNA, 184 bp, Artificial
  mutated myrosinase
ttattaataagagaagaaaaagatggttaattttagttacatgcattacttaaatgattctatattaatatgcacagacaagatttcaaagattatgccgatctatgtttcaaagaatttggtggaaaggtaaagtcgatctttacaggaccaaatataaggtgaatgctgtctccatatgtga

SEQ ID NO: 143 - DNA, 173 bp, Artificial
  mutated myrosinase
agaagaaaaagatggttaattttagttacatgcattactgaaatgattctctattaatatgcacagacaagatttcaaagattatgccgatctatgtttcaacgaatttggtggaaaggtaaagtcgatctttacaggaccaaatataaggtgaatgctgtctccatatgtga

SEQ ID NO: 144 - DNA, 173 bp, Artificial
  mutated myrosinase
agaagaaaaagatggttaattttagttacatgcattactgaaatgattctctattaatatgcacagacaagatttcaaagattatgccgatctatgtttcaaagaatttggtggaaaggtaaagtcgatctttacaggaccaaatataaggtgaatgctgtctccatatgtga

SEQ ID NO: 145 - DNA, 147 bp, Artificial
  mutated myrosinase
tacatgcattactgaaatgattctatattaatatgcacagacaagatttccaagattatgccgatctatgtttcaaagaatttggtggaaaggtaaagtcgatctttacaggaccaaatataaggtgaatgctgtctccatatgtga

SEQ ID NO: 146 - DNA, 121 bp, Artificial
  mutated myrosinase
attaatatgcacagacaagatttcaaagattatgccgatctatgtttcaacgaatttggtggaaaggtaaagtcgatctttacaggaccaaatataaggtgaatgctgtctccatatgtga

SEQ ID NO: 147 - DNA, 101 bp, Artificial
  mutated myrosinase
tttcaaagattatgccgatctatgtttcaaagaatttggtggaaaggtaaagtcgatctttacaggaccaaatataaggtgaatgctgtctccatatgtga

SEQ ID NO: 148 - DNA, 101 bp, Artificial
  mutated myrosinase
aagaatttccggcgtaacatgtagaatcaacctttggagaacatcgaccagtgatcctaatccatagcctctcgtaggcactgagtagagctggttgattg

SEQ ID NO: 149 - DNA, 101 bp, Artificial
  mutated myrosinase
gcaccaccttaatatggagagaccactcaccttatatttggtcctgtaaagaaccataggagaacatcgaccgggtgcatctgttccgaccgcatagcctc

SEQ ID NO: 150 - DNA, 101 bp, Artificial
  mutated myrosinase
tctgttccgaccgcatagcctctcgtagggactgtgtatagctggttgatcgtgctttacctttccaccaaattctttgaaacatagatccgcgtagtctt

SEQ ID NO: 151 - DNA, 101 bp, Artificial
  mutated myrosinase
gctatgcgatcggaacagatgcacccggtcgatgttctcctatggttgattcaggtgttacggcggaaattcttcaacagaaccctacatcgttgcacata

SEQ ID NO: 152 - DNA, 101 bp, Artificial
  mutated myrosinase
tcttcaacagaaccctacatcgttgcacataaccagcttcttgctcatgcatcgatctttacaggaccaaatataaggtgagtggcctccatatgtgaaaa

SEQ ID NO: 153 - DNA, 101 bp, Artificial; identical to SEQ ID NO: 147
  mutated myrosinase

SEQ ID NO: 154 - DNA, 101 bp, Artificial
  mutated myrosinase
agatttcaaagactatgcggatctatgtttcaaagaatttggtggaaaggttcacgatcaaccagctattcacagtgcctacgagaggctatgcactcgga

SEQ ID NO: 155 - DNA, 101 bp, Artificial
  mutated myrosinase
gaagaatttccggcgtaacatgtaggatcaacctttggagaacatcgaccatgatcctaatccatagcctctcgtaggcactgagtagagctggttgattg

SEQ ID NO: 156 - DNA, 101 bp, Artificial
  mutated myrosinase
aagaatttccggcgtaacatgtagaatcaacctttggagaacatcgaccaggcatctgatcctaatccatagcctctcgtaggcactgagtagagctggtt

SEQ ID NO: 157 - DNA, 101 bp, Artificial
  mutated myrosinase
gcaccaccttaatatggagagaccactcaccttatatttggtcctgtaaagcgtggcatgagcaagaagctggttatgtgcaacgatgtagggttctgttg

SEQ ID NO: 158 - DNA, 101 bp, Artificial
  mutated myrosinase
gtgcatctgttccgaccgcatagcctctcgtagggactgtgtatagctggttgctttacctttccaccaaattctttgaaacatagatccgcgtagtcttt

SEQ ID NO: 159 - DNA, 101 bp, Artificial
  mutated myrosinase
tgttccgaccgcatagcctctcgtagggactgtgtatagctggttgatcgtctttacctttccaccaaattctttgaaacatagatccgcgtagtctttga

SEQ ID NO: 160 - DNA, 101 bp, Artificial
  mutated myrosinase
atctttatcacgtattgagacaactcaccttgtatttggtcctgtaaagatcgtggcatgagcaagaagctggttatgtgcaacgatgtagggttctgttg

SEQ ID NO: 161 - DNA, 102 bp, Artificial
  mutated myrosinase
gaggctatgcgatcggaacagatgcacccggtcgatgttctcctatggttaccgatctttacaggaccaaatataaggtgagtggcctccatatgtgaaaag

SEQ ID NO: 162 - DNA, 171 bp, Artificial
  mutated myrosinase
tgcgatcggaacagatgcacccggtcgatgttctcctatggttgataccacaggtgttacggcggaaattcttcaacagaaccctacatcgttgcacataaccagcttcttgctcatgccaaccaaatataaggtgagtggcctccatatgtgaaaaggtggtctaaatct

SEQ ID NO: 163 - DNA, 101 bp, Artificial
  mutated myrosinase
gatttcaaagattatgccgatctatgtttcaaagaatttggtggaaaggtagatcacgatcaaccagctatacacagtccctacgagaggctatgcagtcg

SEQ ID NO: 164 - DNA, 101 bp, Artificial
  mutated myrosinase
cttcaacagaaccctatatcgttgcacataaccagcttcttgctcatgccacgatctttacaggaccaaatataaggtgaatgctgtctccatatgtgaaa

SEQ ID NO: 165 - DNA, 101 bp, Artificial
  mutated myrosinase
ggtgcatctgttccgagtgcatagcctctcgtaggcactgtgtatagctggttctttgaaacatagatccgcgtaatctttgaaatcttggctgtgcatat

SEQ ID NO: 166 - DNA, 101 bp, Artificial
  mutated myrosinase
cacatatggagtcaccactcaccttatatttggtcctgtaaagatcgacgcggcatgagcaagaagctggttatgtgcaacgatgtagggttctgttgaag

SEQ ID NO: 167 - DNA, 101 bp, Artificial
  mutated myrosinase
aagaatgattatatattaatatgcacagacaagatttcaaagactatgcgggcctacgagaggctatgcactcggaacagatgcacccggtagatgttctc

SEQ ID NO: 168 - DNA, 101 bp, Artificial
  mutated myrosinase
agatttcaaagactatgcggatctatgtttcaaagaatttggtggaaaggtacgatcaaccagctattcacagtgcctacgagaggctatgcactcggaac

SEQ ID NO: 169 - DNA, 101 bp, Artificial
  mutated myrosinase
gctggttatgtgcaactatataaggttctgttgaagaatttccgccgtaacaccttcggagaacatcgaccgggtgcatctgttccgattgcatagcctct

SEQ ID NO: 170 - DNA, 101 bp, Artificial
  mutated myrosinase
gttatgtgcaactatataaggttctgttgaagaatttccgccgtaacatctcttcggagaacatcgaccgggtgcatctgttccgattgcatagcctctcg

SEQ ID NO: 171 - DNA, 101 bp, Artificial
  mutated myrosinase
tgcatctgttccgattgcatagcctctcgtaggcactgtgtacagctggttacctttccaccaaattccttgaaacatagatccgcataatctctaaagtc

SEQ ID NO: 172 - DNA, 101 bp, Artificial
  mutated myrosinase
tgttccgattgcatagcctctcgtaggcactgtgtacagctggttaatcgatcttcacctttccaccaaattccttgaaacatagatccgcataatctcta

SEQ ID NO: 173 - DNA, 101 bp, Artificial
  mutated myrosinase
tgaagaatttccggcgtaacatgtaggatcaacctttggagaacatcgaccatcctaatccatagcctctcgtaggcactgagtagagctggttgattgtg

SEQ ID NO: 174 - DNA, 101 bp, Artificial
  mutated myrosinase
gaagaatttccggcgtaacatgtaggatcaacctttggagaacatcgaccaatcctaatccatagcctctcgtaggcactgagtagagctggttgattgtg

SEQ ID NO: 175 - DNA, 101 bp, Artificial
  mutated myrosinase
ctgatcctaatccatagcctctcgtaggcactgagtagagctggttgattgtactttgtcaccaaattcttcgaaacatagatccgcgtaatctctgaaat

SEQ ID NO: 176 - DNA, 101 bp, Artificial
  mutated myrosinase
ttccgaccgcatagcctctcgtagggactgtgtatagctggttgatcgtgatacctttccaccaaattctttgaaacatagatccgcgtagtctttgaaat

SEQ ID NO: 177 - DNA, 101 bp, Artificial
  mutated myrosinase
ttatcacgtattgagacaactcaccttgtatttggtcctgtaaagatcgacggcatgagcaagaagctggttatgtgcaacgatgtagggttctgttgaag

SEQ ID NO: 178 - DNA, 113 bp, Artificial
  mutated myrosinase
accgggtgcatctgttccgaccgcatagcctctcgtagggactgtgtataactggttgatcgtctttacctttccaccaaattctttgaaacatagatccgcgtaatctttga

SEQ ID NO: 179 - DNA, 101 bp, Artificial
  mutated myrosinase
atttcaaagattatgccgatctatgtttcaaagaatttggtggaaaggtaaatcaaccagctatacacagtccctacgagaggctatgcagtcggaacaga

SEQ ID NO: 180 - DNA, 101 bp, Artificial
  mutated myrosinase
ttccgctcgcatagcctcttgtcggcactgtatatagctggttgatcgtgagctttacctttccaccaaattcattgaaacatagatccgcgtaatctttg

SEQ ID NO: 181 - DNA, 101 bp, Artificial
  mutated myrosinase
agctggttatgtgcaactatataaggttctgttgaagaatttccgccgtaacttcggagaacatcgaccgggtgcatctgttccgattgcatagcctctcg

SEQ ID NO: 182 - DNA, 101 bp, Artificial
  mutated myrosinase
gatcctaatccatagcctctcgtaggcactgagtagagctggttgattgtggctttactttgtcaccaaattcttcgaaacatagatccgcgtaatctctg

SEQ ID NO: 183 - DNA, 101 bp, Artificial; identical to SEQ ID NO: 177
  mutated myrosinase

SEQ ID NO: 184 - DNA, 113 bp, Artificial; identical to SEQ ID NO: 178
  mutated myrosinase

SEQ ID NO: 185 - DNA, 120 bp, Artificial
  mutated myrosinase
attaatatgcacagacaagatttcaaagattatgccgatctatgtttcaacgaatttggtggaaaggtaaatcaaccagctatacacagtccctacgagaggctatgcagtcggaacaga

SEQ ID NO: 186 - DNA, 101 bp, Artificial; identical to SEQ ID NO: 179
  mutated myrosinase

SEQ ID NO: 187 - DNA, 101 bp, Artificial; identical to SEQ ID NO: 176
  mutated myrosinase

SEQ ID NO: 188 - DNA, 101 bp, Artificial; identical to SEQ ID NO: 177
  mutated myrosinase

SEQ ID NO: 189 - DNA, 113 bp, Artificial; identical to SEQ ID NO: 178
  mutated myrosinase

SEQ ID NO: 190 - DNA, 101 bp, Artificial; identical to SEQ ID NO: 179
  mutated myrosinase

SEQ ID NO: 191 - DNA, 101 bp, Artificial; identical to SEQ ID NO: 180
  mutated myrosinase

SEQ ID NO: 192 - DNA, 101 bp, Artificial; identical to SEQ ID NO: 181
  mutated myrosinase

SEQ ID NO: 193 - DNA, 170 bp, Artificial
  mutated myrosinase
ttggtcacgtgatatatatatatatatgactatacattagaatcagatatcttagattacactacaccatctttatcacgtattgagacaactcaccttgtatttggtcctgtaaagatcgtgctttacctttccaccaaattctttgaaacatagatccgcgtagtctt

SEQ ID NO: 194 - DNA, 101 bp, Artificial
  mutated myrosinase
acaccatctttatcacgtattgagacaactcaccttgtatttggtcctgtaatgtgcaacgatgtagggttctgttgaagaatttccaccgtaacacctgt

SEQ ID NO: 195 - DNA, 113 bp, Artificial
  mutated myrosinase
accgggtgcatctgttccgaccgcatagcctctcgtagggactgtgtataactggttgatcgtgtgctttacctttccaccaaattctttgaaacatagatccgcgtaatctt

SEQ ID NO: 196 - DNA, 101 bp, Artificial
  mutated myrosinase
gaggctatgcgatcggaacagatgcacccggtcgatgttctcctatggttgacaggtgttacggcggaaattcttcaacagaaccctacatcgttgcacat

SEQ ID NO: 197 - DNA, 101 bp, Artificial
  mutated myrosinase
acccggtcgatgttctcctatggttgataccaagcacaggtgttacggcgtaaattcttcaacagaaccctacatcgttgcacataaccagcttcttgctc

SEQ ID NO: 198 - DNA, 101 bp, Artificial
  mutated myrosinase
ttcttcaacagaaccctacatcgttgcacataaccagcttcttgctcatgccgtcgatctttacaggaccaaatataaggtgagtggcctccatatgtgaa

SEQ ID NO: 199 - DNA, 101 bp, Artificial
  mutated myrosinase
cttcaacagaaccctacatcgttgcacataaccagcttcttgctcatgccacgatctttacaggaccaaatataaggtgagtggcctccatatgtgaaaag

SEQ ID NO: 200 - DNA, 101 bp, Artificial; identical to SEQ ID NO: 147
  mutated myrosinase

SEQ ID NO: 201 - DNA, 194 bp, Artificial
  mutated myrosinase
tcttgttatcatcacaggtccaatcttcccgttttggaactgttggtcacatgatatatatgactagatcagaatcagatggattaagatcacaccatcgtattaaatatggagactactcaccttatagttggtcctgtgtaatctttgaaacatagatccgcgtaatctttgaaatcctggctgttcatatt

SEQ ID NO: 202 - DNA, 231 bp, Artificial
  mutated myrosinase
tgagtatgaaggttttttggatcgccagatcatgtatgtgccatgcttctgaggagagtaaatattattagtaatagaagaagaagatttagtcttaattacatgtttactgaaatgattctatactaatatgaacagccaggatttcaaagattacgcggatctatgtttcaaagattacacaggaccaactataaggtgagtagtctccatatttaatacgatggtgtg

SEQ ID NO: 203 - DNA, 233 bp, Artificial
  mutated myrosinase
aggttttttggatcgccagatcatgtatgtgccatgcttcttaattatatttgaggagagtaaatattattagtaatagaagaagaagatttagtcttaattacatgtttactgaaatgattctatactaatatgaacagccaggatttcaaagattacgcggatctatgtttcaaagattacacaggaccaactataaggtgagtagtctccatatttaatacgatggtgtg

SEQ ID NO: 204 - DNA, 101 bp, Artificial; identical to SEQ ID NO: 170
  mutated myrosinase

SEQ ID NO: 205 - DNA, 101 bp, Artificial
  mutated myrosinase
gtgcatctgttccgattgcatagcctctcgtaggcactgtgtacagctggtttcttcacctttccaccaaattccttgaaacatagatccgcataatctct

SEQ ID NO: 206 - DNA, 101 bp, Artificial
  mutated myrosinase
atcctaatccatagcctctcgtaggcactgagtagagctggttgattgtgagctttactttgtcaccaaattcttcgaaacatagatccgcgtaatctctg

SEQ ID NO: 207 - DNA, 101 bp, Artificial; identical to SEQ ID NO: 194
  mutated myrosinase

SEQ ID NO: 208 - DNA, 113 bp, Artificial; identical to SEQ ID NO: 195
  mutated myrosinase

SEQ ID NO: 209 - DNA, 101 bp, Artificial; identical to SEQ ID NO: 196
  mutated myrosinase

SEQ ID NO: 210 - DNA, 101 bp, Artificial; identical to SEQ ID NO: 198
  mutated myrosinase

SEQ ID NO: 211 - DNA, 101 bp, Artificial; identical to SEQ ID NO: 199
  mutated myrosinase

SEQ ID NO: 212 - DNA, 194 bp, Artificial; identical to SEQ ID NO: 201
  mutated myrosinase

SEQ ID NO: 213 - DNA, 231 bp, Artificial; identical to SEQ ID NO: 202
  mutated myrosinase

SEQ ID NO: 214 - DNA, 233 bp, Artificial; identical to SEQ ID NO: 203
  mutated myrosinase

SEQ ID NO: 215 - DNA, 101 bp, Artificial; identical to SEQ ID NO: 170
  mutated myrosinase

SEQ ID NO: 216 - DNA, 101 bp, Artificial; identical to SEQ ID NO: 205
  mutated myrosinase

SEQ ID NO: 217 - DNA, 101 bp, Artificial; identical to SEQ ID NO: 206
  mutated myrosinase

SEQ ID NO: 218 - DNA, 101 bp, Artificial; identical to SEQ ID NO: 148
  mutated myrosinase

SEQ ID NO: 219 - DNA, 101 bp, Artificial; identical to SEQ ID NO: 149
  mutated myrosinase

SEQ ID NO: 220 - DNA, 101 bp, Artificial; identical to SEQ ID NO: 150
  mutated myrosinase

SEQ ID NO: 221 - DNA, 101 bp, Artificial; identical to SEQ ID NO: 151
  mutated myrosinase

SEQ ID NO: 222 - DNA, 101 bp, Artificial; identical to SEQ ID NO: 152
  mutated myrosinase

SEQ ID NO: 223 - DNA, 101 bp, Artificial; identical to SEQ ID NO: 147
  mutated myrosinase

SEQ ID NO: 224 - DNA, 101 bp, Artificial
  mutated myrosinase
tggttatgtgcaacgatgtagggttctgttgaagaatttccgccgtaacaccaaccataggagaacatcgaccgggtgcatctgttccgactgcatagcct

SEQ ID NO: 225 - DNA, 101 bp, Artificial; identical to SEQ ID NO: 154
  mutated myrosinase

SEQ ID NO: 226 - DNA, 123 bp, Artificial
  mutated myrosinase
acaaacctatatatactcaccttatattttgtcctgtaaacatcgaccgcttatataaggtgagtatagttgcacatacatgatggtgcggttcaagaaaccttcatactcatcttgcagtgt

SEQ ID NO: 227 - DNA, 101 bp, Artificial; identical to SEQ ID NO: 155
  mutated myrosinase

SEQ ID NO: 228 - DNA, 101 bp, Artificial; identical to SEQ ID NO: 148
  mutated myrosinase

SEQ ID NO: 229 - DNA, 101 bp, Artificial; identical to SEQ ID NO: 149
  mutated myrosinase

SEQ ID NO: 230 - DNA, 101 bp, Artificial; identical to SEQ ID NO: 150
  mutated myrosinase

SEQ ID NO: 231 - DNA, 101 bp, Artificial; identical to SEQ ID NO: 151
  mutated myrosinase

SEQ ID NO: 232 - DNA, 101 bp, Artificial; identical to SEQ ID NO: 152
  mutated myrosinase

SEQ ID NO: 233 - DNA, 101 bp, Artificial; identical to SEQ ID NO: 147
  mutated myrosinase

SEQ ID NO: 234 - DNA, 101 bp, Artificial; identical to SEQ ID NO: 224
  mutated myrosinase

SEQ ID NO: 235 - DNA, 101 bp, Artificial; identical to SEQ ID NO: 154
  mutated myrosinase

SEQ ID NO: 236 - DNA, 101 bp, Artificial; identical to SEQ ID NO: 155
  mutated myrosinase

SEQ ID NO: 237 - DNA, 101 bp, Artificial; identical to SEQ ID NO: 160
  mutated myrosinase

SEQ ID NO: 238 - DNA, 111 bp, Artificial
  mutated myrosinase
accgggtgcatctgttccgaccgcatagcctctcgtagggactgtgtataactggttgatcatcttgtctgcatatgaatatataattatttcagttaatacatgtaatta

SEQ ID NO: 239 - DNA, 101 bp, Artificial
  mutated myrosinase
aggctatgcgatcggaacagatgcacccggtcgatgttctcctatggttgaacaggtgttacggcggaaattcttcaacagaaccctacatcgttgcacat

SEQ ID NO: 240 - DNA, 101 bp, Artificial
  mutated myrosinase
agatttcaaagattatgccgatctatgtttcaaagaatttggtggaaaggtaaccagctatacacagtccctacgagaggctatgcagtcggaacagatgc

SEQ ID NO: 241 - DNA, 101 bp, Artificial
  mutated myrosinase
cttcaacagaaccctatatcgttgcacataaccagcttcttgctcatgccacgtcgatctttacaggaccaaatataaggtgaatgctgtctccatatgtg

SEQ ID NO: 242 - DNA, 101 bp, Artificial
  mutated myrosinase
tcaaagactatgcggatctatgtttcaaagaatttggtggaaaggtaaagcgatcacgatcaaccagctattcacagtgcctacgagaggctatgcactcg

SEQ ID NO: 243 - DNA, 101 bp, Artificial
  mutated myrosinase
ctggttatgtgcaactatataaggttctgttgaagaatttccgccgtaacattcggagaacatcgaccgggtgcatctgttccgattgcatagcctctcgt

SEQ ID NO: 244 - DNA, 101 bp, Artificial
  mutated myrosinase
ccgattgcatagcctctcgtaggcactgtgtacagctggttaatcgtgatccttcacctttccaccaaattccttgaaacatagatccgcataatctctaa

SEQ ID NO: 245 - DNA, 101 bp, Artificial
  mutated myrosinase
gaagaatttccggcgtaacatgtaggatcaacctttggagaacatcgaccagatcctaatccatagcctctcgtaggcactgagtagagctggttgattgt

SEQ ID NO: 246 - DNA, 101 bp, Artificial
  mutated myrosinase
ggtgcatctgatcctaatccatagcctctcgtaggcactgagtagagctgtttcgaaacatagatccgcgtaatctctgaaatcatctctgcgagtattat

SEQ ID NO: 247 - DNA, 101 bp, Artificial
  mutated myrosinase
ctgatcctaatccatagcctctcgtaggcactgagtagagctggttgattggtcaccaaattcttcgaaacatagatccgcgtaatctctgaaatcatctc

SEQ ID NO: 248 - DNA, 101 bp, Artificial; identical to SEQ ID NO: 160
  mutated myrosinase

SEQ ID NO: 249 - DNA, 111 bp, Artificial; identical to SEQ ID NO: 238
  mutated myrosinase

SEQ ID NO: 250 - DNA, 101 bp, Artificial; identical to SEQ ID NO: 239
  mutated myrosinase

SEQ ID NO: 251 - DNA, 101 bp, Artificial; identical to SEQ ID NO: 240
  mutated myrosinase

SEQ ID NO: 252 - DNA, 101 bp, Artificial; identical to SEQ ID NO: 241
  mutated myrosinase

SEQ ID NO: 253 - DNA, 101 bp, Artificial; identical to SEQ ID NO: 242
  mutated myrosinase

SEQ ID NO: 254 - DNA, 101 bp, Artificial; identical to SEQ ID NO: 243
  mutated myrosinase

SEQ ID NO: 255 - DNA, 101 bp, Artificial; identical to SEQ ID NO: 244
  mutated myrosinase

SEQ ID NO: 256 - DNA, 101 bp, Artificial; identical to SEQ ID NO: 245
  mutated myrosinase

SEQ ID NO: 257 - DNA, 101 bp, Artificial; identical to SEQ ID NO: 246
  mutated myrosinase

SEQ ID NO: 258 - DNA, 101 bp, Artificial; identical to SEQ ID NO: 247
  mutated myrosinase

SEQ ID NO: 259 - DNA, 101 bp, Artificial; identical to SEQ ID NO: 156
  mutated myrosinase

SEQ ID NO: 260 - DNA, 101 bp, Artificial; identical to SEQ ID NO: 157
  mutated myrosinase

SEQ ID NO: 261 - DNA, 101 bp, Artificial; identical to SEQ ID NO: 158
  mutated myrosinase

SEQ ID NO: 262 - DNA, 101 bp, Artificial; identical to SEQ ID NO: 159
  mutated myrosinase

SEQ ID NO: 263 - DNA, 101 bp, Artificial; identical to SEQ ID NO: 160
  mutated myrosinase

SEQ ID NO: 264 - DNA, 102 bp, Artificial; identical to SEQ ID NO: 161
  mutated myrosinase

SEQ ID NO: 265 - DNA, 171 bp, Artificial; identical to SEQ ID NO: 162
  mutated myrosinase

SEQ ID NO: 266 - DNA, 101 bp, Artificial; identical to SEQ ID NO: 163
  mutated myrosinase

SEQ ID NO: 267 - DNA, 101 bp, Artificial; identical to SEQ ID NO: 164
  mutated myrosinase

SEQ ID NO: 268 - DNA, 101 bp, Artificial; identical to SEQ ID NO: 165
  mutated myrosinase

SEQ ID NO: 269 - DNA, 101 bp, Artificial; identical to SEQ ID NO: 166
  mutated myrosinase

SEQ ID NO: 270 - DNA, 101 bp, Artificial; identical to SEQ ID NO: 167
  mutated myrosinase

SEQ ID NO: 271 - DNA, 101 bp, Artificial; identical to SEQ ID NO: 168
  mutated myrosinase

SEQ ID NO: 272 - DNA, 101 bp, Artificial; identical to SEQ ID NO: 169
  mutated myrosinase

SEQ ID NO: 273 - DNA, 101 bp, Artificial; identical to SEQ ID NO: 170
  mutated myrosinase

SEQ ID NO: 274 - DNA, 101 bp, Artificial; identical to SEQ ID NO: 171
  mutated myrosinase

SEQ ID NO: 275 - DNA, 101 bp, Artificial; identical to SEQ ID NO: 172
  mutated myrosinase

SEQ ID NO: 276 - DNA, 101 bp, Artificial; identical to SEQ ID NO: 173
  mutated myrosinase

SEQ ID NO: 277 - DNA, 101 bp, Artificial; identical to SEQ ID NO: 174
  mutated myrosinase

SEQ ID NO: 278 - DNA, 101 bp, Artificial; identical to SEQ ID NO: 175
  mutated myrosinase

SEQ ID NO: 279 - DNA, 101 bp, Artificial; identical to SEQ ID NO: 156
  mutated myrosinase

SEQ ID NO: 280 - DNA, 101 bp, Artificial; identical to SEQ ID NO: 157
  mutated myrosinase

SEQ ID NO: 281 - DNA, 101 bp, Artificial; identical to SEQ ID NO: 158
  mutated myrosinase

SEQ ID NO: 282 - DNA, 101 bp, Artificial; identical to SEQ ID NO: 159
  mutated myrosinase

SEQ ID NO: 283 - DNA, 101 bp, Artificial; identical to SEQ ID NO: 160
  mutated myrosinase

SEQ ID NO: 284 - DNA, 102 bp, Artificial; identical to SEQ ID NO: 161
  mutated myrosinase

SEQ ID NO: 285 - DNA, 171 bp, Artificial; identical to SEQ ID NO: 162
  mutated myrosinase

SEQ ID NO: 286 - DNA, 101 bp, Artificial; identical to SEQ ID NO: 163
  mutated myrosinase

SEQ ID NO: 287 - DNA, 101 bp, Artificial; identical to SEQ ID NO: 164
  mutated myrosinase

SEQ ID NO: 288 - DNA, 101 bp, Artificial; identical to SEQ ID NO: 165
  mutated myrosinase

SEQ ID NO: 289 - DNA, 101 bp, Artificial; identical to SEQ ID NO: 166
  mutated myrosinase

SEQ ID NO: 290 - DNA, 101 bp, Artificial; identical to SEQ ID NO: 167
  mutated myrosinase

SEQ ID NO: 291 - DNA, 101 bp, Artificial; identical to SEQ ID NO: 168
  mutated myrosinase

SEQ ID NO: 292 - DNA, 101 bp, Artificial; identical to SEQ ID NO: 169
  mutated myrosinase

SEQ ID NO: 293 - DNA, 101 bp, Artificial; identical to SEQ ID NO: 170
  mutated myrosinase

SEQ ID NO: 294 - DNA, 101 bp, Artificial; identical to SEQ ID NO: 171
  mutated myrosinase

SEQ ID NO: 295 - DNA, 101 bp, Artificial; identical to SEQ ID NO: 172
  mutated myrosinase

SEQ ID NO: 296 - DNA, 101 bp, Artificial; identical to SEQ ID NO: 173
  mutated myrosinase

SEQ ID NO: 297 - DNA, 101 bp, Artificial; identical to SEQ ID NO: 174
  mutated myrosinase

SEQ ID NO: 298 - DNA, 101 bp, Artificial; identical to SEQ ID NO: 175
  mutated myrosinase

SEQ ID NO: 299 - DNA, 101 bp, Artificial; identical to SEQ ID NO: 160
  mutated myrosinase

SEQ ID NO: 300 - DNA, 111 bp, Artificial; identical to SEQ ID NO: 238
  mutated myrosinase

SEQ ID NO: 301 - DNA, 101 bp, Artificial; identical to SEQ ID NO: 239
  mutated myrosinase

SEQ ID NO: 302 - DNA, 101 bp, Artificial; identical to SEQ ID NO: 240
  mutated myrosinase

SEQ ID NO: 303 - DNA, 101 bp, Artificial; identical to SEQ ID NO: 241
  mutated myrosinase

SEQ ID NO: 304 - DNA, 101 bp, Artificial
  mutated myrosinase
aaccctatatcgttgcacataaccagcttcttgctcatgccacggtcgtcaatctttacaggaccaaatataaggtgaatgctgtctccatatgtgaaaat

SEQ ID NO: 305 - DNA, 101 bp, Artificial; identical to SEQ ID NO: 242
  mutated myrosinase

SEQ ID NO: 306 - DNA, 101 bp, Artificial; identical to SEQ ID NO: 243
  mutated myrosinase

SEQ ID NO: 307 - DNA, 101 bp, Artificial; identical to SEQ ID NO: 244
  mutated myrosinase

SEQ ID NO: 308 - DNA, 141 bp, Artificial
  mutated myrosinase
agaatttccggcgtaacatgtaggatcaacctttggagaacatcgaccagatcctaatccatagcctctcgtaggcactgagtagagctgtttcgaaacatagatccgcgtaatctctgaaatcatctctgcgagtattat

SEQ ID NO: 309 - DNA, 101 bp, Artificial; identical to SEQ ID NO: 247
  mutated myrosinase

SEQ ID NO: 310 - DNA, 101 bp, Artificial; identical to SEQ ID NO: 160
  mutated myrosinase

SEQ ID NO: 311 - DNA, 111 bp, Artificial; identical to SEQ ID NO: 238
  mutated myrosinase

SEQ ID NO: 312 - DNA, 101 bp, Artificial; identical to SEQ ID NO: 239
  mutated myrosinase

SEQ ID NO: 313 - DNA, 101 bp, Artificial; identical to SEQ ID NO: 240
  mutated myrosinase

SEQ ID NO: 314 - DNA, 101 bp, Artificial; identical to SEQ ID NO: 241
  mutated myrosinase

SEQ ID NO: 315 - DNA, 101 bp, Artificial; identical to SEQ ID NO: 242
  mutated myrosinase

SEQ ID NO: 316 - DNA, 101 bp, Artificial; identical to SEQ ID NO: 243
  mutated myrosinase

SEQ ID NO: 317 - DNA, 101 bp, Artificial; identical to SEQ ID NO: 244
  mutated myrosinase

SEQ ID NO: 318 - DNA, 141 bp, Artificial; identical to SEQ ID NO: 308
  mutated myrosinase

SEQ ID NO: 319 - DNA, 101 bp, Artificial; identical to SEQ ID NO: 247
  mutated myrosinase

SEQ ID NO: 320 - DNA, 101 bp, Artificial; identical to SEQ ID NO: 176
  mutated myrosinase

SEQ ID NO: 321 - DNA, 115 bp, Artificial
  mutated myrosinase
ccgaccgcatagcctctcgtagggactgtgtatagctggttgatcgtgatacctttccaccaaagtctttgaaacatagatccgcgtagtctttgaaatcttgtctgtgcatatt

SEQ ID NO: 322 - DNA, 101 bp, Artificial; identical to SEQ ID NO: 177
  mutated myrosinase

SEQ ID NO: 323 - DNA, 113 bp, Artificial; identical to SEQ ID NO: 178
  mutated myrosinase

SEQ ID NO: 324 - DNA, 120 bp, Artificial; identical to SEQ ID NO: 185
  mutated myrosinase

SEQ ID NO: 325 - DNA, 101 bp, Artificial; identical to SEQ ID NO: 179
  mutated myrosinase

SEQ ID NO: 326 - DNA, 101 bp, Artificial
  mutated myrosinase
aaccagcttcttgctcatgccacggtcgtcgatctttacaggaccaaatacaaggtgaatgctgtctccatatgtgaaaattaaggtggtgtctaacatat

SEQ ID NO: 327 - DNA, 101 bp, Artificial
  mutated myrosinase
atgttagatttgcaccaccttaatatggagagaccactcaccttatattttgtcctgtaaagatcgacgaccgtggcatgagcaagaagctggttatgtgc

SEQ ID NO: 328 - DNA, 101 bp, Artificial
  mutated myrosinase
ttagatttgcaccaccttaatatggagagaccactcaccttatatttggttctgtaaagatcgacgaccgtggcatgagcaagaagctggttatgtgcaac

SEQ ID NO: 329 - DNA, 101 bp, Artificial
  mutated myrosinase
caccttaatatggagagaccactcaccttatatttggtcctgtaaagatctacgaccgtggcatgagcaagaagctggttatgtgcaacgatgtagggttc

SEQ ID NO: 330 - DNA, 101 bp, Artificial
  mutated myrosinase
tatggagagaccactcaccttatatttggtcctgtaaagatcgacgaccggggcatgagcaagaagctggttatgtgcaacgatgtagggttctgttgaag

SEQ ID NO: 331 - DNA, 101 bp, Artificial; identical to SEQ ID NO: 176
  mutated myrosinase

SEQ ID NO: 332 - DNA, 101 bp, Artificial
  mutated myrosinase
ccgaccgcatagcctctcgtagggactgtgtatagctggttgatcgtgattcctttccaccaaattctttgaaacatagatccgcgtagtctttgaaatct

SEQ ID NO: 333 - DNA, 101 bp, Artificial
  mutated myrosinase
agcctctcgtagggactgtgtatagctggttgatcgtgatccagtgcttttcctttccaccaaattctttgaaacatagatccgcgtagtctttgaaatct

SEQ ID NO: 334 - DNA, 101 bp, Artificial; identical to SEQ ID NO: 177
  mutated myrosinase

SEQ ID NO: 335 - DNA, 113 bp, Artificial
  mutated myrosinase
atcacgtattgagacaactcaccttgtatttggtcctgtaaagatcgacggcatgagcaagacgctggttatgtgcaacgatgtagggttctgttgaagaatttccaccgtaa

SEQ ID NO: 336 - DNA, 113 bp, Artificial; identical to SEQ ID NO: 178
  mutated myrosinase

SEQ ID NO: 337 - DNA, 101 bp, Artificial
  mutated myrosinase
acagatgcacccggtcgatgttctcctatggttgataccaagcacaggtggtacggcggaaattcttcaacagaaccctacatcgttgcacataaccagct

SEQ ID NO: 338 - DNA, 101 bp, Artificial
  mutated myrosinase
ggaaattcttcaacagaaccctacatcgttgcacataaccagcttcttgcgcatgccacggtcgtcgatctttacaggaccaaatataaggtgagtggcct

SEQ ID NO: 339 - DNA, 101 bp, Artificial
  mutated myrosinase
cttcaacagaaccctacatcgttgcacataaccagcttcttgctcatgccccggtcgtcgatctttacaggaccaaatataaggtgagtggcctccatatg

SEQ ID NO: 340 - DNA, 101 bp, Artificial
  mutated myrosinase
cctacatcgttgcacataaccagcttcttgctcatgccacggtcgtcgatatttacaggaccaaatataaggtgagtggcctccatatgtgaaaaggtggt

SEQ ID NO: 341 - DNA, 101 bp, Artificial
  mutated myrosinase
tgcacataaccagcttcttgctcatgccacggtcgtcgatctttacaggaacaaatataaggtgagtggcctccatatgtgaaaaggtggtctaaatctaa

SEQ ID NO: 342 - DNA, 101 bp, Artificial; identical to SEQ ID NO: 179
  mutated myrosinase

SEQ ID NO: 343 - DNA, 101 bp, Artificial
  mutated myrosinase
gaaccctatatcgttgcacataaccagcttcttgctcatgccacggtcgtagatctttacaggaccaaatataaggtgaatgctgtctccatatgtgaaaa

SEQ ID NO: 344 - DNA, 101 bp, Artificial
  mutated myrosinase
ggcatgagcaagaagctggttatgtgcaacgatgtagggttctgttgaagcatttccgccgtaacacctgtgcttggtatcaaccatataagaacatcgac

SEQ ID NO: 345 - DNA, 101 bp, Artificial
  mutated myrosinase
tatgtgcaacgatgtagggttctgttgaagaatttccgccgtaacacctgcgcttggtatcaaccatataagaacatcgaccgggtgcatctgttccgctc

SEQ ID NO: 346 - DNA, 101 bp, Artificial
  mutated myrosinase
tatgtgcaacgatgtagggttctgttgaagaatttccgccgtaacacctgggcttggtatcaaccatataagaacatcgaccgggtgcatctgttccgctc

SEQ ID NO: 347 - DNA, 101 bp, Artificial
  mutated myrosinase
tgcaacgatgtagggttctgttgaagaatttccgccgtaacacctgtgctgggtatcaaccatataagaacatcgaccgggtgcatctgttccgctcgcat

SEQ ID NO: 348 - DNA, 101 bp, Artificial
  mutated myrosinase
gtgcatctgttccgctcgcatagcctcttgtcggcactgtatatagctgggtgatcgtgatccagtgctttacctttccaccaaattcattgaaacataga

SEQ ID NO: 349 - DNA, 101 bp, Artificial
  mutated myrosinase
agcctcttgtcggcactgtatatagctggttgatcgtgatccagtgctttccctttccaccaaattcattgaaacatagatccgcgtaatctttgaaatct

SEQ ID NO: 350 - DNA, 101 bp, Artificial
  mutated myrosinase
tttacaccactctaattttcacatatggagtcaccactcaccttatatttcgtcctgtaaagatcgacgaccgtggcatgagcaagaagctggttatgtgc

SEQ ID NO: 351 - DNA, 101 bp, Artificial
  mutated myrosinase
ttacaccactctaattttcacatatggagtcaccactcaccttatatttgatcctgtaaagatcgacgaccgtggcatgagcaagaagctggttatgtgca

SEQ ID NO: 352 - DNA, 101 bp, Artificial
  mutated myrosinase
ttacaccactctaattttcacatatggagtcaccactcaccttatatttgctcctgtaaagatcgacgaccgtggcatgagcaagaagctggttatgtgca

SEQ ID NO: 353 - DNA, 101 bp, Artificial
  mutated myrosinase
tatggagtcaccactcaccttatatttggtcctgtaaagatcgacgaccgcggcatgagcaagaagctggttatgtgcaacgatgtagggttctgttgaag

SEQ ID NO: 354 - DNA, 101 bp, Artificial
  mutated myrosinase
cacagacaagatttcaaagactatgcggatctatgtttcaaagaatttggcggaaaggtaaagcactggatcacgatcaaccagctattcacagtgcctac

SEQ ID NO: 355 - DNA, 101 bp, Artificial
  mutated myrosinase
tttcaaagactatgcggatctatgtttcaaagaatttggtggaaaggtaacgcactggatcacgatcaaccagctattcacagtgcctacgagaggctatg

SEQ ID NO: 356 - DNA, 101 bp, Artificial
  mutated myrosinase
tctatgtttcaaagaatttggtggaaaggtaaagcactggatcacgatcacccagctattcacagtgcctacgagaggctatgcactcggaacagatgcac

SEQ ID NO: 357 - DNA, 101 bp, Artificial
  mutated myrosinase
gaagctggttatgtgcaactatataaggttctgttgaagaatttccgccgaaacatctctcatcaaccttcggagaacatcgaccgggtgcatctgttccg

SEQ ID NO: 358 - DNA, 101 bp, Artificial
  mutated myrosinase
tataaggttctgttgaagaatttccgccgtaacatctctcatcaaccttctgagaacatcgaccgggtgcatctgttccgattgcatagcctctcgtaggc

SEQ ID NO: 359 - DNA, 101 bp, Artificial
  mutated myrosinase
tgttccgattgcatagcctctcgtaggcactgtgtacagctggttaatcgggatccagttcttcacctttccaccaaattccttgaaacatagatccgcat

SEQ ID NO: 360 - DNA, 101 bp, Artificial
  mutated myrosinase
aatcagatatgttagatttgcaccaccttaatatggagagaccactcaccatatatttggtcctgtaaagatcgacgaccgtggcatgagcaagaagctgg

SEQ ID NO: 361 - DNA, 101 bp, Artificial
  mutated myrosinase
gcaccaccttaatatggagagaccactcaccttatatttggtcctgtaaatcgtggcatgagcaagaagctggttatgtgcaacgatgtagggttctgttg

SEQ ID NO: 362 - DNA, 101 bp, Artificial; identical to SEQ ID NO: 157
  mutated myrosinase

SEQ ID NO: 363 - DNA, 102 bp, Artificial
  mutated myrosinase
caccaccttaatatggagagaccactcaccttatatttggtcctgtaaaggtcgtggcatgagcaagaagctggttatgtgcaacgatgtagggttctgttg

SEQ ID NO: 364 - DNA, 102 bp, Artificial
  mutated myrosinase
caccaccttaatatggagagaccactcaccttatatttggtcctgtaaagcttggcatgagcaagaagctggttatgtgcaacgatgtagggttctgttgaa

SEQ ID NO: 365 - DNA, 103 bp, Artificial
  mutated myrosinase
caccaccttaatatggagagaccactcaccttatatttggtcctgtaaagcgaggcatgagcaagaagctggttatgtgcaacgatgtagggttctgttgaag

SEQ ID NO: 366 - DNA, 103 bp, Artificial
  mutated myrosinase
caccaccttaatatggagagaccactcaccttatatttggtcctgtaaagcgcggcatgagcaagaagctggttatgtgcaacgatgtagggttctgttgaag

SEQ ID NO: 367 - DNA, 101 bp, Artificial
  mutated myrosinase
accactcaccttatatttggtcctgtaaagatcgacgaccgtggcatgagaaagaagctggttatgtgcaacgatgtagggttctgttgaagaatttccac

SEQ ID NO: 368 - DNA, 101 bp, Artificial; identical to SEQ ID NO: 158
  mutated myrosinase

SEQ ID NO: 369 - DNA, 103 bp, Artificial
  mutated myrosinase
atctgttccgaccgcatagcctctcgtagggactgtgtatagctggttgagcgttgaaacatagatccgcgtagtctttgaaatcttgtctgtgcatattata

SEQ ID NO: 370 - DNA, 101 bp, Artificial
  mutated myrosinase
ctgttccgaccgcatagcctctcgtagggactgtgtatagctggttgatcgttccaccaaattctttgaaacatagatccgcgtagtctttgaaatcttgt

SEQ ID NO: 371 - DNA, 101 bp, Artificial
  mutated myrosinase
ctgttccgaccgcatagcctctcgtagggactgtgtatagctggttgatcgttgaaacatagatccgcgtagtctttgaaatcttgtctgtgcatattata

SEQ ID NO: 372 - DNA, 101 bp, Artificial; identical to SEQ ID NO: 159
  mutated myrosinase

SEQ ID NO: 373 - DNA, 114 bp, Artificial
  mutated myrosinase
gttccgaccgcatagcctctcgtagggactgtgtatagctggttgatcgtctttacctttccaacaaattctttgaaacatagatccgcgtagtctttgaaatcttgtctgtgc

SEQ ID NO: 374 - DNA, 119 bp, Artificial
  mutated myrosinase
gttccgaccgcatagcctctcgtagggactgtgtatagctggttgatcgtctttacctttccaccaaagtctttgaaacatagatccgcgtagtctttgaaatcttgtctgtgcatatt

SEQ ID NO: 375 - DNA, 110 bp, Artificial
  mutated myrosinase
gttccgaccgcatagcctctcgtagggactgtgtatagctggttgatcgttccaccaaagtctttgaaacatagatccgcgtagtctttgaaatcttgtctgtgcatatt

SEQ ID NO: 376 - DNA, 121 bp, Artificial
  mutated myrosinase
atcttagattacactacaccatctttatcacgtattgagacaactcacctcgtatttggtcctgtaaagatcgtggcatgagcaagaagctggttatgtgcaacgatgtagggttctgttg

SEQ ID NO: 377 - DNA, 121 bp, Artificial
  mutated myrosinase
atcttagattacactacaccatctttatcacgtattgagacaactcacctggtatttggtcctgtaaagatcgtggcatgagcaagaagctggttatgtgcaacgatgtagggttctgttg

SEQ ID NO: 378 - DNA, 114 bp, Artificial
  mutated myrosinase
attacactacaccatctttatcacgtattgagacaactcaccttgtattttgtcctgtaaagatcgtggcatgagcaagaagctggttatgtgcaacgatgtagggttctgttg

SEQ ID NO: 379 - DNA, 101 bp, Artificial; identical to SEQ ID NO: 160
  mutated myrosinase

SEQ ID NO: 380 - DNA, 102 bp, Artificial
  mutated myrosinase
tttatcacgtattgagacaactcaccttgtatttggtcctgtaaagatcgtcgcatgagcaagaagctggttatgtgcaacgatgtagggttctgttgaaga

SEQ ID NO: 381 - DNA, 103 bp, Artificial
  mutated myrosinase
tttatcacgtattgagacaactcaccttgtatttggtcctgtaaagatcgtgtcatgagcaagaagctggttatgtgcaacgatgtagggttctgttgaagaa

SEQ ID NO: 382 - DNA, 126 bp, Artificial
  mutated myrosinase
gaggctatgcgatcggaacagatgcacccggtcgatgttctcctatggttaccgatctttacaggaccaaatatacggtgagtggcctccatatgtgaaaaggtggtctaaatctaacatatccga

SEQ ID NO: 383 - DNA, 126 bp, Artificial
  mutated myrosinase
gaggctatgcgatcggaacagatgcacccggtcgatgttctcctatggttaccgatctttacaggaccaaatatagggtgagtggcctccatatgtgaaaaggtggtctaaatctaacatatccga

SEQ ID NO: 384 - DNA, 102 bp, Artificial; identical to SEQ ID NO: 161
  mutated myrosinase

SEQ ID NO: 385 - DNA, 176 bp, Artificial
  mutated myrosinase
ggctatgcgatcggaacagatgcacccggtcgatgttctcctatggttgagaccacaggtgttacggcggaaattcttcaacagaaccctacatcgttgcacataaccagcttcttgctcatgccaaccaaatataaggtgagtggcctccatatgtgaaaaggtggtctaaatct

SEQ ID NO: 386 - DNA, 171 bp, Artificial
  mutated myrosinase
tgcgatcggaacagatgcacccggtcgatgttctcctatggttgataccacaggtgttacggcggaaattcttcaacagaacactacatcgttgcacataaccagcttcttgctcatgccaaccaaatataaggtgagtggcctccatatgtgaaaaggtggtctaaatct

SEQ ID NO: 387 - DNA, 171 bp, Artificial; identical to SEQ ID NO: 162
  mutated myrosinase

SEQ ID NO: 388 - DNA, 119 bp, Artificial
  mutated myrosinase
attaatatgcacagacaagatttcaaagattatgccgatctatgtttcaacgaatttggtggaaaggtagatcacgatcaaccagctatacacagtccctacgagaggctatgcagtcg

SEQ ID NO: 389 - DNA, 101 bp, Artificial; identical to SEQ ID NO: 163
  mutated myrosinase

SEQ ID NO: 390 - DNA, 101 bp, Artificial; identical to SEQ ID NO: 164
  mutated myrosinase

SEQ ID NO: 391 - DNA, 101 bp, Artificial
  mutated myrosinase
ccagcttcttgctcatgccacggtcgtcgatctttacaggaccaaatatagggtgaatgctgtctccatatgtgaaaattaaggtggtgtctaacatatct

SEQ ID NO: 392 - DNA, 101 bp, Artificial; identical to SEQ ID NO: 165
  mutated myrosinase

SEQ ID NO: 393 - DNA, 108 bp, Artificial
  mutated myrosinase
gcatctgttccgagtgcatagcctctcgtaggcactgtgtatagctggttctttgaatcatagatccgcgtaatctttgaaatcttggctgtgcatattagtatagaa

SEQ ID NO: 394 - DNA, 109 bp, Artificial
  mutated myrosinase
ctaattttcacatatggagtcaccactcaccttatatttggtcctgtaaatatcgacgcggcatgagcaagaagctggttatgtgcaacgatgtagggttctgttgaag

SEQ ID NO: 395 - DNA, 101 bp, Artificial; identical to SEQ ID NO: 166
  mutated myrosinase

SEQ ID NO: 396 - DNA, 112 bp, Artificial
  mutated myrosinase
tgctttactgaaagaatgattatatattaatatgcacagacaagatttcacagactatgcgggcctacgagaggctatgcactcggaacagatgcacccggtagatgttctc

SEQ ID NO: 397 - DNA, 101 bp, Artificial; identical to SEQ ID NO: 167
  mutated myrosinase

SEQ ID NO: 398 - DNA, 103 bp, Artificial
  mutated myrosinase
agaatgattatatattaatatgcacagacaagatttcaaagactatgcgggcatacgagaggctatgcactcggaacagatgcacccggtagatgttctccta

SEQ ID NO: 399 - DNA, 101 bp, Artificial
  mutated myrosinase
cgcagcatgagcaagaagctggttatgtgcaactatataaggttctgttgcagaatttccgccgtaacatctctcatcaaccttcggagaacatcgaccgg

SEQ ID NO: 400 - DNA, 119 bp, Artificial
  mutated myrosinase
agcatgagcaagaagctggttatgtgcaactatataaggttctgttgaagcatttccgccgtaacatctcttcggagaacatcgaccgggtgcatctgttccgattgcatagcctctcg

SEQ ID NO: 401 - DNA, 101 bp, Artificial; identical to SEQ ID NO: 170
  mutated myrosinase

SEQ ID NO: 402 - DNA, 126 bp, Artificial
  mutated myrosinase
tgttccgattgcatagcctctcgtaggcactgtgtacagctggttaatcgatcttcaccttgccaccaaattcctggaaacatagatccgcataatctctaaagtcatctctgtgcatagcataga

SEQ ID NO: 403 - DNA, 112 bp, Artificial
  mutated myrosinase
tgttccgattgcatagcctctcgtaggcactgtgtacagctggttaatcgatcttcaccttgccaccaaattccttgaaacatagatccgcataatctctaaagtcatctct

SEQ ID NO: 404 - DNA, 126 bp, Artificial
  mutated myrosinase
tgttccgattgcatagcctctcgtaggcactgtgtacagctggttaatcgatcttcacctttccaccaaattcctggaaacatagatccgcataatctctaaagtcatctctgtgcatagcataga

SEQ ID NO: 405 - DNA, 101 bp, Artificial; identical to SEQ ID NO: 172
  mutated myrosinase

SEQ ID NO: 406 - DNA, 104 bp, Artificial
  mutated myrosinase
gttgaagaatttccggcgtaacatgtaggatcaacctttggagaacatcggccaatcctaatccatagcctctcgtaggcactgagtagagctggttgattgtg

SEQ ID NO: 407 - DNA, 101 bp, Artificial; identical to SEQ ID NO: 174
  mutated myrosinase

SEQ ID NO: 408 - DNA, 101 bp, Artificial; identical to SEQ ID NO: 175
  mutated myrosinase

SEQ ID NO: 409 - DNA, 119 bp, Artificial
  mutated myrosinase
gatcctaatccatagcctctcgtaggcactgagtagagctggttgattgtactttgtcaccaaattctgcgaaacatagatccgcgtaatctctgaaatcatctctgcgagtattatag

SEQ ID NO: 410 - DNA, 109 bp, Artificial
  mutated myrosinase
gatcctaatccatagcctctcgtaggcactgagtagagctggttgattgtactttgtctccaaattcttcgaaacatagatccgcgtaatctctgaaatcatctctgcg

SEQ ID NO: 411 - DNA, 101 bp, Artificial; identical to SEQ ID NO: 157
  mutated myrosinase

SEQ ID NO: 412 - DNA, 101 bp, Artificial; identical to SEQ ID NO: 158
  mutated myrosinase

SEQ ID NO: 413 - DNA, 101 bp, Artificial; identical to SEQ ID NO: 159
  mutated myrosinase

SEQ ID NO: 414 - DNA, 105 bp, Artificial
  mutated myrosinase
gttccgaccgcatagcctctcgtagggactgtgtatagctggttgatcgtctttccctttccaccaaattctttgaaacatagatccgcgtagtctttgaaatct

SEQ ID NO: 415 - DNA, 105 bp, Artificial
  mutated myrosinase
gttccgaccgcatagcctctcgtagggactgtgtatagctggttgatcgtcttttcctttccaccaaattctttgaaacatagatccgcgtagtctttgaaatct

SEQ ID NO: 416 - DNA, 101 bp, Artificial; identical to SEQ ID NO: 160
  mutated myrosinase

SEQ ID NO: 417 - DNA, 115 bp, Artificial
  mutated myrosinase
acagtgcctacaagaggctatgcgatcggaacagatgcacccggtcgatggtctcctatggttaccgatctttacaggaccaaatataaggtgagtggcctccatatgtgaaaag

SEQ ID NO: 418 - DNA, 117 bp, Artificial
  mutated myrosinase
gaggctatgcgatcggaacagatgcacccggtcgatgttctcctatggttaccgatctttacaggaacaaatataaggtgagtggcctccatatgtgaaaaggtggtctaaatctaa

SEQ ID NO: 419 - DNA, 102 bp, Artificial; identical to SEQ ID NO: 161
  mutated myrosinase

SEQ ID NO: 420 - DNA, 171 bp, Artificial; identical to SEQ ID NO: 162
  mutated myrosinase

SEQ ID NO: 421 - DNA, 120 bp, Artificial
  mutated myrosinase
gcattactgaaatgattctatattaatatgcacagacaagatttcaaagactacgcggatctatgtttcaacgatcaaccagctatacacagtccctacgagaggctatgcagtcggaac

SEQ ID NO: 422 - DNA, 110 bp, Artificial
  mutated myrosinase
cacagacaagatttcaaagattatgccgatctatgtttcaaagaatttgggggaaaggtagatcacgatcaaccagctatacacagtccctacgagaggctatgcagtcg

SEQ ID NO: 423 - DNA, 101 bp, Artificial; identical to SEQ ID NO: 163
  mutated myrosinase

SEQ ID NO: 424 - DNA, 101 bp, Artificial; identical to SEQ ID NO: 164
  mutated myrosinase

SEQ ID NO: 425 - DNA, 200 bp, Artificial
  mutated myrosinase
caacagaaccctatatcgttgcacataaccagcttcttgctcatgccacgatctttacaggaccaaatataaggtgaatgctgtctccatatgtgaaaattaaggtggtgtctaacatatctgattctaatgtaaatatcacgtgaccagcagttccaaaaagggaagattggacctgtgatgataacaagatggtttct

SEQ ID NO: 426 - DNA, 201 bp, Artificial
  mutated myrosinase
caacagaaccctatatcgttgcacataaccagcttcttgctcatgccacgatctttacaggaccaaatataaggtgaatgctgtctccatatgtgaaaattaaggtggtgtctaacatatctgattctaatgtaaatatcacgtgaccaacaagggaagattggacctgtgatgataacaagatggtttcttccatttgat

SEQ ID NO: 427 - DNA, 206 bp, Artificial
  mutated myrosinase
caacagaaccctatatcgttgcacataaccagcttcttgctcatgccacgatctttacaggaccaaatataaggtgaatgctgtctccatatgtgaaaattaaggtggtgtctaacatatctgattctaatgtaaatatcacgtgaccaacagtttcaaaaagggaagattggacctgtgatgataacaagatggtttcttccatt

SEQ ID NO: 428 - DNA, 221 bp, Artificial
  mutated myrosinase
caacagaaccctatatcgttgcacataaccagcttcttgctcatgccacgatctttacaggaccaaatataaggtgaatgctgtctccatatgtgaaaattaaggtggtgtctaacatatctgattctaatgtaaatatcacgtgaccaacagttccaaggagggaagatcggacctgtgatgataacaagatggtttcttccatttgatgagtctgatcc

SEQ ID NO: 429 - DNA, 212 bp, Artificial
  mutated myrosinase
caacagaaccctatatcgttgcacataaccagcttcttgctcatgccacgatctttacaggaccaaatataaggtgaatgctgtctccatatgtgaaaattaaggtggtgtctaacatatctgattctaatgtaaatatcacgtgaccaacagttccaaaacgggaagattggacctgtgatgataacaagatggtttcttccatttgatga

SEQ ID NO: 430 - DNA, 150 bp, Artificial
  mutated myrosinase
caacagaaccctatatcgttgcacataaccagcttcttgctcatgccacgatctttacaggaccaaatataaggtgaatgctgtctccatatgtgaaaagtaaggtggtgtctaacatatctgattctaatgtaaatatcacgtgaccaa

SEQ ID NO: 431 - DNA, 101 bp, Artificial; identical to SEQ ID NO: 165
  mutated myrosinase

SEQ ID NO: 432 - DNA, 101 bp, Artificial; identical to SEQ ID NO: 166
  mutated myrosinase

SEQ ID NO: 433 - DNA, 118 bp, Artificial
  mutated myrosinase
attacatgctttactgaaagaatgattatatattaatatgcacagacaagctttcaaagactatgcgggcctacgagaggctatgcactcggaacagatgcacccggtagatgttctc

SEQ ID NO: 434 - DNA, 101 bp, Artificial; identical to SEQ ID NO: 167
  mutated myrosinase

SEQ ID NO: 435 - DNA, 108 bp, Artificial
  mutated myrosinase
gaagctggttatgtgcaactatataaggttctgttgaagaatttccgccgaaacatctcttcggagaacatcgaccgggtgcatctgttccgattgcatagcctctcg

SEQ ID NO: 436 - DNA, 101 bp, Artificial; identical to SEQ ID NO: 170
  mutated myrosinase

SEQ ID NO: 437 - DNA, 101 bp, Artificial; identical to SEQ ID NO: 172
  mutated myrosinase

SEQ ID NO: 438 - DNA, 107 bp, Artificial
  mutated myrosinase
tgttccgattgcatagcctctcgtaggcactgtgtacagctggttaatcgatcttcccctttccaccaaattccttgaaacatagatccgcataatctctaaagtca

SEQ ID NO: 439 - DNA, 101 bp, Artificial; identical to SEQ ID NO: 174
  mutated myrosinase

SEQ ID NO: 440 - DNA, 101 bp, Artificial; identical to SEQ ID NO: 175
  mutated myrosinase

SEQ ID NO: 441 - DNA, 111 bp, Artificial
  mutated myrosinase
tgttagatttgcaccaccttaatatggagagaccactcaccttatatttgttcctgtaaagcgtggcatgagcaagaagctggttatgtgcaacgatgtagggttctgttg

SEQ ID NO: 442 - DNA, 101 bp, Artificial; identical to SEQ ID NO: 361
  mutated myrosinase

SEQ ID NO: 443 - DNA, 101 bp, Artificial; identical to SEQ ID NO: 157
  mutated myrosinase

SEQ ID NO: 444 - DNA, 102 bp, Artificial; identical to SEQ ID NO: 363
  mutated myrosinase

SEQ ID NO: 445 - DNA, 101 bp, Artificial; identical to SEQ ID NO: 158
  mutated myrosinase

SEQ ID NO: 446 - DNA, 103 bp, Artificial; identical to SEQ ID NO: 369
  mutated myrosinase

SEQ ID NO: 447 - DNA, 101 bp, Artificial; identical to SEQ ID NO: 370
  mutated myrosinase

SEQ ID NO: 448 - DNA, 101 bp, Artificial; identical to SEQ ID NO: 371
  mutated myrosinase

SEQ ID NO: 449 - DNA, 101 bp, Artificial; identical to SEQ ID NO: 159
  mutated myrosinase

SEQ ID NO: 450 - DNA, 110 bp, Artificial; identical to SEQ ID NO: 375
  mutated myrosinase

SEQ ID NO: 451 - DNA, 114 bp, Artificial; identical to SEQ ID NO: 373
  mutated myrosinase

SEQ ID NO: 452 - DNA, 119 bp, Artificial; identical to SEQ ID NO: 374
  mutated myrosinase

SEQ ID NO: 453 - DNA, 121 bp, Artificial; identical to SEQ ID NO: 376
  mutated myrosinase

SEQ ID NO: 454 - DNA, 121 bp, Artificial; identical to SEQ ID NO: 377
  mutated myrosinase

SEQ ID NO: 455 - DNA, 101 bp, Artificial; identical to SEQ ID NO: 160
  mutated myrosinase

SEQ ID NO: 456 - DNA, 118 bp, Artificial
  mutated myrosinase
tttatcacgtattgagacaactcaccttgtatttggtcctgtaaagatcgtggcatgagcaagaagccggttatgtgcaacgatgtagggttctgttgaagaatttccaccgtaacac

SEQ ID NO: 457 - DNA, 203 bp, Artificial
  mutated myrosinase
aaccagctatacacagtgcctacaagaggctatgcgatcggaacagatgcgcccggtcgatgttctcctatggttgataccacaggtgttacggcggaaattcttcaacagaaccctacatcgttgcacataaccagcttcttgctcatgccaaccaaatataaggtgagtggcctccatatgtgaaaaggtggtctaaatct

SEQ ID NO: 458 - DNA, 202 bp, Artificial
  mutated myrosinase
accagctatacacagtgcctacaagaggctatgcgatcggaacagatgcaaccggtcgatgttctcctatggttgataccacaggtgttacggcggaaattcttcaacagaaccctacatcgttgcacataaccagcttcttgctcatgccaaccaaatataaggtgagtggcctccatatgtgaaaaggtggtctaaatct

SEQ ID NO: 459 - DNA, 176 bp, Artificial; identical to SEQ ID NO: 385
  mutated myrosinase

SEQ ID NO: 460 - DNA, 182 bp, Artificial
  mutated myrosinase
tgcgatcggaacagatgcacccggtcgatgttctcctatggttgataccacaggtgttacggcggaaattcttcaacagaacactacatcgttgcacataaccagcttcttgctcatgccaaccaaatatacggtgagtggcctccatatgtgaaaaggtggtctaaatctaacatatccga

SEQ ID NO: 461 - DNA, 182 bp, Artificial
  mutated myrosinase
tgcgatcggaacagatgcacccggtcgatgttctcctatggttgataccacaggtgttacggcggaaattcttcaacagaacactacatcgttgcacataaccagcttcttgctcatgccaaccaaatatagggtgagtggcctccatatgtgaaaaggtggtctaaatctaacatatccga

SEQ ID NO: 462 - DNA, 171 bp, Artificial; identical to SEQ ID NO: 386
  mutated myrosinase

SEQ ID NO: 463 - DNA, 182 bp, Artificial
  mutated myrosinase
tgcgatcggaacagatgcacccggtcgatgttctcctatggttgataccacaggtgttacggcggaaattcttcaacagaaccctacatcgttgcacataaccagcttcttgctcatgccaaccaaatatacggtgagtggcctccatatgtgaaaaggtggtctaaatctaacatatccga

SEQ ID NO: 464 - DNA, 182 bp, Artificial
  mutated myrosinase
tgcgatcggaacagatgcacccggtcgatgttctcctatggttgataccacaggtgttacggcggaaattcttcaacagaaccctacatcgttgcacataaccagcttcttgctcatgccaaccaaatatagggtgagtggcctccatatgtgaaaaggtggtctaaatctaacatatccga

SEQ ID NO: 465 - DNA, 171 bp, Artificial; identical to SEQ ID NO: 162
  mutated myrosinase

SEQ ID NO: 466 - DNA, 120 bp, Artificial; identical to SEQ ID NO: 421
  mutated myrosinase

SEQ ID NO: 467 - DNA, 132 bp, Artificial
  mutated myrosinase
gaaatgattctatattaatatgcacagacaagatttcaaagattatgccgctctatgtttcaaagaatttggtggaaaggtagatcacgatcaaccagctatacacagtccctacgagaggctatgcagtcg

SEQ ID NO: 468 - DNA, 126 bp, Artificial
  mutated myrosinase
attctatattaatatgcacagacaagatttcaaagattatgccgatctatttttcaaagaatttggtggaaaggtagatcacgatcaaccagctatacacagtccctacgagaggctatgcagtcg

SEQ ID NO: 469 - DNA, 119 bp, Artificial; identical to SEQ ID NO: 388
  mutated myrosinase

SEQ ID NO: 470 - DNA, 102 bp, Artificial
  mutated myrosinase
agatttcaaagattatgccgatctatgtttcaaagaatttggtggaaaggaagatcacgatcaaccagctatacacagtccctacgagaggctatgcagtcg

SEQ ID NO: 471 - DNA, 102 bp, Artificial
  mutated myrosinase
agatttcaaagattatgccgatctatgtttcaaagaatttggtggaaaggcagatcacgatcaaccagctatacacagtccctacgagaggctatgcagtcg

SEQ ID NO: 472 - DNA, 101 bp, Artificial; identical to SEQ ID NO: 163
  mutated myrosinase

SEQ ID NO: 473 - DNA, 125 bp, Artificial
  mutated myrosinase
agcacaggtgttacggcggaaattcttcaacagaaccctatatcgttgcaaataaccagcttcttgctcatgccacgatctttacaggaccaaatataaggtgaatgctgtctccatatgtgaaa

SEQ ID NO: 474 - DNA, 101 bp, Artificial; identical to SEQ ID NO: 164
  mutated myrosinase

SEQ ID NO: 475 - DNA, 108 bp, Artificial
  mutated myrosinase
caacagaaccctatatcgttgcacataaccagcttcttgctcatgccacgatctttaaaggaccaaatataaggtgaatgctgtctccatatgtgaaaattaaggtgg

SEQ ID NO: 476 - DNA, 115 bp, Artificial
  mutated myrosinase
aagaacatcgaccgggtgcatctgttccgagtgcatagcctctcgtaggcgctgtgtatagctggttctttgaaacatagatccgcgtaatctttgaaatcttggctgtgcatat

SEQ ID NO: 477 - DNA, 101 bp, Artificial; identical to SEQ ID NO: 165
  mutated myrosinase

SEQ ID NO: 478 - DNA, 108 bp, Artificial; identical to SEQ ID NO: 393
  mutated myrosinase

SEQ ID NO: 479 - DNA, 129 bp, Artificial
  mutated myrosinase
ctaattttcacatatggagtcaccactcaccttatatttggtcctgtaaatatcgacgcggcatgagcaagaagctgggtatgtgcaacgatgtagggttctgttgaagaatttccgccgtaacacctg

SEQ ID NO: 480 - DNA, 109 bp, Artificial; identical to SEQ ID NO: 394
  mutated myrosinase

SEQ ID NO: 481 - DNA, 120 bp, Artificial
  mutated myrosinase
cacatatggagtcaccactcaccttatatttggtcctgtaaagatcgacgcggcatgagcaagaagctgtttatgtgcaacgatgtagggttctgttgaagaatttccgccgtaacacct

SEQ ID NO: 482 - DNA, 121 bp, Artificial
  mutated myrosinase
cacatatggagtcaccactcaccttatatttggtcctgtaaagatcgacgcggcatgagcaagaagctgggtatgtgcaacgatgtagggttctgttgaagaatttccgccgtaacacctg

SEQ ID NO: 483 - DNA, 101 bp, Artificial; identical to SEQ ID NO: 166
  mutated myrosinase

SEQ ID NO: 484 - DNA, 161 bp, Artificial
  mutated myrosinase
ttattaataaaaacaagaagaagaagaagaaggttttgtcttaattacattctttactgaaagactgattatatattaatatgcacagacaagatttcacagactatgcgggcctacgagaggctatgcactcggaacagatgcacccggtagatgttctc

SEQ ID NO: 485 - DNA, 192 bp, Artificial
  mutated myrosinase
ttattaataaaaacaagaagaagaagaagaaggttttgtcttaattacattctttactgaaagactgattatatattaatatgcacagacaagatttcacagactatgcggatctatgtttcaaagaatttggtggaaaggtacgatcaaccagctattcacagtgcctacgagaggctatgcactcggaac

SEQ ID NO: 486 - DNA, 161 bp, Artificial
  mutated myrosinase
ttattaataaaaacaagaagaagaagaagaaggttttgtcttaattacattctttactgaaagaatgattatatattaatatgcacagacaagatttcacagactatgcgggcctacgagaggctatgcactcggaacagatgcacccggtagatgttctc

SEQ ID NO: 487 - DNA, 192 bp, Artificial
  mutated myrosinase
ttattaataaaaacaagaagaagaagaagaaggttttgtcttaattacattctttactgaaagaatgattatatattaatatgcacagacaagatttcacagactatgcggatctatgtttcaaagaatttggtggaaaggtacgatcaaccagctattcacagtgcctacgagaggctatgcactcggaac

SEQ ID NO: 488 - DNA, 161 bp, Artificial
  mutated myrosinase
ttattaataaaaacaagaagaagaagaagaaggttttgtcttaattacattctttactgaaagaatgattatatattaatatgcacagacaagatttcaaagactatgcgggcctacgagaggctatgcactcggaacagatgcacccggtagatgttctc

SEQ ID NO: 489 - DNA, 192 bp, Artificial
  mutated myrosinase
ttattaataaaaacaagaagaagaagaagaaggttttgtcttaattacattctttactgaaagaatgattatatattaatatgcacagacaagatttcaaagactatgcggatctatgtttcaaagaatttggtggaaaggtacgatcaaccagctattcacagtgcctacgagaggctatgcactcggaac

SEQ ID NO: 490 - DNA, 133 bp, Artificial
  mutated myrosinase
gaaggttttgtcttaattacatgctttactgaaagaatgattatatattactatgcacagacaagatttcaaagactatgcgggcctacgagaggctatgcactcggaacagatgcacccggtagatgttctc

SEQ ID NO: 491 - DNA, 164 bp, Artificial
  mutated myrosinase
gaaggttttgtcttaattacatgctttactgaaagaatgattatatattactatgcacagacaagatttcaaagactatgcggatctatgtttcaaagaatttggtggaaaggtacgatcaaccagctattcacagtgcctacgagaggctatgcactcggaac

SEQ ID NO: 492 - DNA, 112 bp, Artificial; identical to SEQ ID NO: 396
  mutated myrosinase

SEQ ID NO: 493 - DNA, 143 bp, Artificial
  mutated myrosinase
tgctttactgaaagaatgattatatattaatatgcacagacaagatttcacagactatgcggatctatgtttcaaagaatttggtggaaaggtacgatcaaccagctattcacagtgcctacgagaggctatgcactcggaac

SEQ ID NO: 494 - DNA, 143 bp, Artificial
  mutated myrosinase
tgctttactgaaagaatgattatatattaatatgcacagacaagatttcacagactattcggatctatgtttcaaagaatttggtggaaaggtacgatcaaccagctattcacagtgcctacgagaggctatgcactcggaac

SEQ ID NO: 495 - DNA, 101 bp, Artificial; identical to SEQ ID NO: 167
  mutated myrosinase

SEQ ID NO: 496 - DNA, 103 bp, Artificial; identical to SEQ ID NO: 398
  mutated myrosinase

SEQ ID NO: 497 - DNA, 101 bp, Artificial; identical to SEQ ID NO: 168
  mutated myrosinase

SEQ ID NO: 498 - DNA, 134 bp, Artificial
  mutated myrosinase
aacatcgaccgccgcagcatgagcaagaagctggttatgtgcaactatatgaggttctgttgaagaatttccgccgtaacatctcttcggagaacatcgaccgggtgcatctgttccgattgcatagcctctcg

SEQ ID NO: 499 - DNA, 130 bp, Artificial
  mutated myrosinase
tcgaccgccgcagcatgagcaagaagctggttatgtgcaactatataaggctctgttgaagaatttccgccgtaacatctcttcggagaacatcgaccgggtgcatctgttccgattgcatagcctctcg

SEQ ID NO: 500 - DNA, 125 bp, Artificial
  mutated myrosinase
cgccgcagcatgagcaagaagctggttatgtgcaactatataaggttctgctgaagaatttccgccgtaacatctcttcggagaacatcgaccgggtgcatctgttccgattgcatagcctctcg

SEQ ID NO: 501 - DNA, 119 bp, Artificial; identical to SEQ ID NO: 400
  mutated myrosinase

SEQ ID NO: 502 - DNA, 108 bp, Artificial
  mutated myrosinase
gaagctggttatgtgcaactatataaggttctgttgaagaatttccgccgcaacatctcttcggagaacatcgaccgggtgcatctgttccgattgcatagcctctcg

SEQ ID NO: 503 - DNA, 101 bp, Artificial; identical to SEQ ID NO: 170
  mutated myrosinase

SEQ ID NO: 504 - DNA, 126 bp, Artificial; identical to SEQ ID NO: 402
  mutated myrosinase

SEQ ID NO: 505 - DNA, 112 bp, Artificial; identical to SEQ ID NO: 403
  mutated myrosinase

SEQ ID NO: 506 - DNA, 115 bp, Artificial
  mutated myrosinase
tgttccgattgcatagcctctcgtaggcactgtgtacagctggttaatcgatcttcacctttccgccaaattccttgaaacatagatccgcataatctctaaagtcatctctgtg

SEQ ID NO: 507 - DNA, 126 bp, Artificial
  mutated myrosinase
tgttccgattgcatagcctctcgtaggcactgtgtacagctggttaatcgatcttcacctttccaccaaatgcctggaaacatagatccgcataatctctaaagtcatctctgtgcatagcataga

SEQ ID NO: 508 - DNA, 122 bp, Artificial
  mutated myrosinase
tgttccgattgcatagcctctcgtaggcactgtgtacagctggttaatcgatcttcacctttccaccaaatgccttgaaacatagatccgcataatctctaaagtcatctctgtgcatagca

SEQ ID NO: 509 - DNA, 125 bp, Artificial
  mutated myrosinase
tgttccgattgcatagcctctcgtaggcactgtgtacagctggttaatcgatcttcacctttccaccaaattccgtgaaacatagatccgcataatctctaaagtcatctctgtgcatagcatag

SEQ ID NO: 510 - DNA, 126 bp, Artificial; identical to SEQ ID NO: 404
  mutated myrosinase

SEQ ID NO: 511 - DNA, 101 bp, Artificial; identical to SEQ ID NO: 172
  mutated myrosinase

SEQ ID NO: 512 - DNA, 101 bp, Artificial; identical to SEQ ID NO: 173
  mutated myrosinase

SEQ ID NO: 513 - DNA, 101 bp, Artificial; identical to SEQ ID NO: 174
  mutated myrosinase

SEQ ID NO: 514 - DNA, 101 bp, Artificial; identical to SEQ ID NO: 175
  mutated myrosinase

SEQ ID NO: 515 - DNA, 119 bp, Artificial; identical to SEQ ID NO: 409
  mutated myrosinase

SEQ ID NO: 516 - DNA, 109 bp, Artificial; identical to SEQ ID NO: 410
  mutated myrosinase

SEQ ID NO: 517 - DNA, 101 bp, Artificial; identical to SEQ ID NO: 157
  mutated myrosinase

SEQ ID NO: 518 - DNA, 117 bp, Artificial
  mutated myrosinase
caccaccttaatatggagagaccactcaccttatatttggtcctgtaaagcgtggcatgagcaagacgctggttatgtgcaacgatgtagggttctgttgaagaatttccaccgtaa

SEQ ID NO: 519 - DNA, 101 bp, Artificial; identical to SEQ ID NO: 158
  mutated myrosinase

SEQ ID NO: 520 - DNA, 101 bp, Artificial; identical to SEQ ID NO: 159
  mutated myrosinase

SEQ ID NO: 521 - DNA, 105 bp, Artificial; identical to SEQ ID NO: 414
  mutated myrosinase

SEQ ID NO: 522 - DNA, 105 bp, Artificial; identical to SEQ ID NO: 415
  mutated myrosinase

SEQ ID NO: 523 - DNA, 101 bp, Artificial; identical to SEQ ID NO: 160
  mutated myrosinase

SEQ ID NO: 524 - DNA, 101 bp, Artificial
  mutated myrosinase
catagcctctcgtagggactgtgtatatctggttgatcgtgatccagtgcgttacctttccaccaaattctttgaaacatagatccgcgtaatctttgaaa

SEQ ID NO: 525 - DNA, 171 bp, Artificial
  mutated myrosinase
tgcgatcggaacagatgcacccggtcgatgttctcctatggttgataccacaggtgttacggcggaaattcttcaacagaaccctacatcgttgcacataaccagcttcttgatcatgccaaccaaatataaggtgagtggcctccatatgtgaaaaggtggtctaaatct

SEQ ID NO: 526 - DNA, 173 bp, Artificial
  mutated myrosinase
tgcgatcggaacagatgcacccggtcgatgttctcctatggttgataccacaggtgttacggcggaaattcttcaacagaaccctacatcgttgcacataaccagcttcttgctcatgccaaacaaatataaggtgagtggcctccatatgtgaaaaggtggtctaaatctaa

SEQ ID NO: 527 - DNA, 171 bp, Artificial; identical to SEQ ID NO: 162
  mutated myrosinase

SEQ ID NO: 528 - DNA, 110 bp, Artificial; identical to SEQ ID NO: 422
  mutated myrosinase

SEQ ID NO: 529 - DNA, 101 bp, Artificial; identical to SEQ ID NO: 163
  mutated myrosinase

SEQ ID NO: 530 - DNA, 101 bp, Artificial; identical to SEQ ID NO: 164
  mutated myrosinase

SEQ ID NO: 531 - DNA, 200 bp, Artificial; identical to SEQ ID NO: 425
  mutated myrosinase

SEQ ID NO: 532 - DNA, 201 bp, Artificial; identical to SEQ ID NO: 426
  mutated myrosinase

SEQ ID NO: 533 - DNA, 206 bp, Artificial; identical to SEQ ID NO: 427
  mutated myrosinase

SEQ ID NO: 534 - DNA, 221 bp, Artificial; identical to SEQ ID NO: 428
  mutated myrosinase

SEQ ID NO: 535 - DNA, 212 bp, Artificial; identical to SEQ ID NO: 429
  mutated myrosinase

SEQ ID NO: 536 - DNA, 150 bp, Artificial; identical to SEQ ID NO: 430
  mutated myrosinase

SEQ ID NO: 537 - DNA, 151 bp, Artificial
  mutated myrosinase
caacagaaccctatatcgttgcacataaccagcttcttgctcatgccacgatctttacaggaccaaatataaggtgaatgctgtctccatatgtgaaaatgaaggtggtgtctaacatatctgattctaatgtaaatatcacgtgaccaac

SEQ ID NO: 538 - DNA, 101 bp, Artificial; identical to SEQ ID NO: 165
  mutated myrosinase

SEQ ID NO: 539 - DNA, 101 bp, Artificial; identical to SEQ ID NO: 166
  mutated myrosinase

SEQ ID NO: 540 - DNA, 118 bp, Artificial; identical to SEQ ID NO: 433
  mutated myrosinase

SEQ ID NO: 541 - DNA, 149 bp, Artificial
  mutated myrosinase
attacatgctttactgaaagaatgattatatattaatatgcacagacaagctttcaaagactatgcggatctatgtttcaaagaatttggtggaaaggtacgatcaaccagctattcacagtgcctacgagaggctatgcactcggaac

SEQ ID NO: 542 - DNA, 101 bp, Artificial; identical to SEQ ID NO: 167
  mutated myrosinase

SEQ ID NO: 543 - DNA, 101 bp, Artificial; identical to SEQ ID NO: 168
  mutated myrosinase

SEQ ID NO: 544 - DNA, 108 bp, Artificial; identical to SEQ ID NO: 435
  mutated myrosinase

SEQ ID NO: 545 - DNA, 101 bp, Artificial; identical to SEQ ID NO: 170
  mutated myrosinase

SEQ ID NO: 546 - DNA, 101 bp, Artificial; identical to SEQ ID NO: 172
  mutated myrosinase

SEQ ID NO: 547 - DNA, 107 bp, Artificial; identical to SEQ ID NO: 438
  mutated myrosinase

SEQ ID NO: 548 - DNA, 101 bp, Artificial; identical to SEQ ID NO: 173
  mutated myrosinase

SEQ ID NO: 549 - DNA, 101 bp, Artificial; identical to SEQ ID NO: 174
  mutated myrosinase

SEQ ID NO: 550 - DNA, 101 bp, Artificial; identical to SEQ ID NO: 175
  mutated myrosinase

SEQ ID NO: 551 - DNA, 101 bp, Artificial; identical to SEQ ID NO: 148
  mutated myrosinase

SEQ ID NO: 552 - DNA, 101 bp, Artificial
  mutated myrosinase
gcaccaccttaatatggagagaccactcaccttatatttggtcctgtaaataaccataggagaacatcgaccgggtgcatctgttccgaccgcatagcctc

SEQ ID NO: 553 - DNA, 101 bp, Artificial; identical to SEQ ID NO: 149
  mutated myrosinase

SEQ ID NO: 554 - DNA, 101 bp, Artificial; identical to SEQ ID NO: 150
  mutated myrosinase

SEQ ID NO: 555 - DNA, 113 bp, Artificial
  mutated myrosinase
ttccgaccgcatagcctctcgtagggactgtgtatagctggttgatcgtgctttacctttcctccaaattctttgaaacatagatccgcgtagtctttgaaatcttgtctgtg

SEQ ID NO: 556 - DNA, 119 bp, Artificial
  mutated myrosinase
ttccgaccgcatagcctctcgtagggactgtgtatagctggttgatcgtgctttacctttccaccaaagtctttgaaacatagatccgcgtagtctttgaaatcttgtctgtgcatatt

SEQ ID NO: 557 - DNA, 102 bp, Artificial
  mutated myrosinase
ttccgaccgcatagcctctcgtagggactgtgtatagctggttgatcgtgcgttacctttccaccaaattctttgaaacatagatccgcgtagtctttgaaa

SEQ ID NO: 558 - DNA, 103 bp, Artificial
  mutated myrosinase
ttccgaccgcatagcctctcgtagggactgtgtatagctggttgatcgtgctgtacctttccaccaaattctttgaaacatagatccgcgtagtctttgaaat

SEQ ID NO: 559 - DNA, 115 bp, Artificial
  mutated myrosinase
agtgcctacaagaggctatgcgatcggaacagatgcacccggtcgatgttatcctatggttgattcaggtgttacggcggaaattcttcaacagaaccctacatcgttgcacata

SEQ ID NO: 560 - DNA, 101 bp, Artificial; identical to SEQ ID NO: 151
  mutated myrosinase

SEQ ID NO: 561 - DNA, 126 bp, Artificial
  mutated myrosinase
tcttcaacagaaccctacatcgttgcacataaccagcttcttgctcatgcatcgatctttacaggaccaaatatacggtgagtggcctccatatgtgaaaaggtggtctaaatctaacatatccga

SEQ ID NO: 562 - DNA, 126 bp, Artificial
  mutated myrosinase
tcttcaacagaaccctacatcgttgcacataaccagcttcttgctcatgcatcgatctttacaggaccaaatatagggtgagtggcctccatatgtgaaaaggtggtctaaatctaacatatccga

SEQ ID NO: 563 - DNA, 126 bp, Artificial
  mutated myrosinase
tcttcaacagaaccctacatcgttgcacataaccagcttcttgctcatgcatcgatctttacaggaccaaatatatggtgagtggcctccatatgtgaaaaggtggtctaaatctaacatatccga

SEQ ID NO: 564 - DNA, 101 bp, Artificial; identical to SEQ ID NO: 152
  mutated myrosinase

SEQ ID NO: 565 - DNA, 108 bp, Artificial
  mutated myrosinase
tcttcaacagaaccctacatcgttgcacataaccagcttcttgctcatgcatcgatcgttacaggaccaaatataaggtgagtggcctccatatgtgaaaaggtggtc

SEQ ID NO: 566 - DNA, 101 bp, Artificial; identical to SEQ ID NO: 224
  mutated myrosinase

SEQ ID NO: 567 - DNA, 127 bp, Artificial
  mutated myrosinase
acaaacctatatatactcaccttatattttgtcctgtaaacatcgaccgcttatataaggtgagtatagttgcacagacatgatggtgcggttcaagaaaccttcatactcatcttgcagtgtttga

SEQ ID NO: 568 - DNA, 129 bp, Artificial
  mutated myrosinase
acaaacctatatatactcaccttatattttgtcctgtaaacatcgaccgcttatataaggtgagtatagttgcacataaatgatggtgcggttcaagaaaccttcatactcatcttgcagtgtttgagg

SEQ ID NO: 569 - DNA, 123 bp, Artificial; identical to SEQ ID NO: 226
  mutated myrosinase

SEQ ID NO: 570 - DNA, 101 bp, Artificial; identical to SEQ ID NO: 155
  mutated myrosinase

SEQ ID NO: 571 - DNA, 101 bp, Artificial; identical to SEQ ID NO: 148
  mutated myrosinase

SEQ ID NO: 572 - DNA, 101 bp, Artificial; identical to SEQ ID NO: 149
  mutated myrosinase

SEQ ID NO: 573 - DNA, 101 bp, Artificial; identical to SEQ ID NO: 150
  mutated myrosinase

SEQ ID NO: 574 - DNA, 101 bp, Artificial; identical to SEQ ID NO: 151
  mutated myrosinase

SEQ ID NO: 575 - DNA, 114 bp, Artificial
  mutated myrosinase
ttacggcggaaattcttcaacagaaccctacatcgttgcacataaccagcgtcttgctcatgcatcgatctttacaggaccaaatataaggtgagtggcctccatatgtgaaaa

SEQ ID NO: 576 - DNA, 117 bp, Artificial
  mutated myrosinase
tcttcaacagaaccctacatcgttgcacataaccagcttcttgctcatgcatcgatctttacaggaacaaatataaggtgagtggcctccatatgtgaaaaggtggtctaaatctaa

SEQ ID NO: 577 - DNA, 101 bp, Artificial; identical to SEQ ID NO: 152
  mutated myrosinase

SEQ ID NO: 578 - DNA, 101 bp, Artificial; identical to SEQ ID NO: 224
  mutated myrosinase

SEQ ID NO: 579 - DNA, 123 bp, Artificial; identical to SEQ ID NO: 226
  mutated myrosinase

SEQ ID NO: 580 - DNA, 101 bp, Artificial; identical to SEQ ID NO: 155
  mutated myrosinase

SEQ ID NO: 581 - DNA, 101 bp, Artificial; identical to SEQ ID NO: 147
  mutated myrosinase

SEQ ID NO: 582 - DNA, 141 bp, Artificial
  mutated myrosinase
acaaacctatatatactcaccttatattttgtcctgtaaacatcgaccgcttatataaggtgagtatagttgcacatacatgatctggcggtcatcaaccttcggagaacatcgaccgggtgcatctgttccgattgcata

SEQ ID NO: 583 - DNA, 101 bp, Artificial; identical to SEQ ID NO: 150
  mutated myrosinase

SEQ ID NO: 584 - DNA, 102 bp, Artificial; identical to SEQ ID NO: 557
  mutated myrosinase

SEQ ID NO: 585 - DNA, 121 bp, Artificial; identical to SEQ ID NO: 146
  mutated myrosinase

SEQ ID NO: 586 - DNA, 101 bp, Artificial; identical to SEQ ID NO: 147
  mutated myrosinase

SEQ ID NO: 587 - DNA, 141 bp, Artificial; identical to SEQ ID NO: 582
  mutated myrosinase

SEQ ID NO: 588 - DNA, 141 bp, Artificial
  mutated myrosinase
acaaacctatatatactcaccttatattttgtcctgtaaacatcgaccgcttatataaggtgagtatagttgcacatacatgatctgggggtcatcaaccttcggagaacatcgaccgggtgcatctgttccgattgcata

SEQ ID NO: 589 - DNA, 101 bp, Artificial; identical to SEQ ID NO: 148
  mutated myrosinase

SEQ ID NO: 590 - DNA, 118 bp, Artificial
  mutated myrosinase
agaatttccggcgtaacatgtagaatcaacctttggagaacatcgaccagtgatcctaatccatagcatctcgtaggcactgagtagagctggttgattgtgaaccagtgctttactt

SEQ ID NO: 591 - DNA, 101 bp, Artificial; identical to SEQ ID NO: 149
  mutated myrosinase

SEQ ID NO: 592 - DNA, 101 bp, Artificial; identical to SEQ ID NO: 150
  mutated myrosinase

SEQ ID NO: 593 - DNA, 101 bp, Artificial; identical to SEQ ID NO: 151
  mutated myrosinase

SEQ ID NO: 594 - DNA, 101 bp, Artificial; identical to SEQ ID NO: 152
  mutated myrosinase

SEQ ID NO: 595 - DNA, 101 bp, Artificial; identical to SEQ ID NO: 147
  mutated myrosinase

SEQ ID NO: 596 - DNA, 108 bp, Artificial
  mutated myrosinase
acagacaagatttcaaagactatgcggatctatgtttcaaagaatttggtagaaaggttcacgatcaaccagctattcacagtgcctacgagaggctatgcactcgga

SEQ ID NO: 597 - DNA, 101 bp, Artificial; identical to SEQ ID NO: 154
  mutated myrosinase

SEQ ID NO: 598 - DNA, 105 bp, Artificial
  mutated myrosinase
cgttgaagaatttccggcgtaacatgtaggatcaacctttggagaacatctaccatgatcctaatccatagcctctcgtaggcactgagtagagctggttgattg

SEQ ID NO: 599 - DNA, 101 bp, Artificial; identical to SEQ ID NO: 155
  mutated myrosinase

SEQ ID NO: 600 - DNA, 114 bp, Artificial
  mutated AOP2
tttttggatgcacaaaaggcaaaaaaaaaagaaagaatgggtgcagacacgcctcaacttccagtctctcggaccaaaccctgaaaccaggaagtgagaagtgggctgaagtca

SEQ ID NO: 601 - DNA, 101 bp, Artificial
  mutated AOP2
aaaaggcaaaaaaaaaagaaagaatgggtgcagacactcctcaacttccagtctctcggaccaaaccctgaaaccaggaagtgagaagtgggctgaagtca

SEQ ID NO: 602 - DNA, 101 bp, Artificial
  mutated AOP2
aaaaggcaaaaaaaaaagaaagaatgggtgcagacactcctcaacttccattcatctatctctcggaccaaaccctgaaaccaggaagtgagaagtgggct

SEQ ID NO: 603 - DNA, 101 bp, Artificial
  mutated AOP2
agacactcctcaacttccagtcatctatctctcggaccaaaccctgaaactaggaagtgagaagtgggctgaagtcaggagtggtgtccgtaaagctctcg

SEQ ID NO: 604 - DNA, 101 bp, Artificial
  mutated AOP2
gagtggtgtccgtaaagctctcgaagaatatggtgctttcgaggtgtcatatgacagaggagcttaagaagtcagttttggatgccatgatagagcttttc

SEQ ID NO: 605 - DNA, 101 bp, Artificial
  mutated AOP2
gaccattatgagtagaatatccagtgtagggttttggagacacgtttctcttcatatgacacctcgaaagcgccgtagtcttcaagagctttacggacatc

SEQ ID NO: 606 - DNA, 115 bp, Artificial
  mutated AOP2
cttagcctcaactggtaagtcgaaaagctctttcatggcttccaaaaccgtaagctcctctgacacatatgacacctcgaaagcgccgtagtcttcaagagctttacggacatca

SEQ ID NO: 607 - DNA, 101 bp, Artificial
  mutated AOP2
taactcgaaaagctctttcatggcttccaaaaccgattgctttagctcctctcatatgacacctcgaaagctccgtagtcttcaagagctttacggacatc

SEQ ID NO: 608 - DNA, 101 bp, Artificial
  mutated AOP2
ctcgaaaagctctttcatggcttccaaaaccgattgctttagctcctctgatatcatatgacacctcgaaagctccgtagtcttcaagagctttacggaca

SEQ ID NO: 609 - DNA, 101 bp, Artificial
  mutated AOP2
ctcgaaaagctctttcatggcttccaaaaccgattgctttagctcctctgacatatgacacctcgaaagctccgtagtcttcaagagctttacggacatca

SEQ ID NO: 610 - DNA, 101 bp, Artificial
  mutated AOP2
agtggtgtccgtaaagctctcgaagaatatggtgctttcgaggtgtcatatgagtgacagaggagcttaagaagtcagttttggatgccatgatagagctt

SEQ ID NO: 611 - DNA, 101 bp, Artificial
  mutated AOP2
gtggtgtccgtaaagctctcgaagaatatggtgctttcgaggtgtcatatgagaggagcttaagaagtcagttttggatgccatgatagagcttttcgagt

SEQ ID NO: 612 - DNA, 101 bp, Artificial
  mutated AOP2
ggagtggtgtccgtaaagctctcgaagaatatggtgctttcgaggtgtcatagaggagcttaagaagtcagttttggatgccatgatagagcttttcgagt

SEQ ID NO: 613 - DNA, 101 bp, Artificial
  mutated AOP2
aactcgttaactttctccaaaacctcagcatcctggatccctagactctcgtaagaaaattaccgttggagttttcttgattctaagagacaacgttggta

SEQ ID NO: 614 - DNA, 101 bp, Artificial
  mutated AOP2
accagcttgatctctttcaatcaaagaaagactccaaaggtagttttcttaagagtctagggatccaggattccaatgttttggagaaagttaacgaattt

SEQ ID NO: 615 - DNA, 101 bp, Artificial; identical to SEQ ID NO: 601
  mutated AOP2

SEQ ID NO: 616 - DNA, 101 bp, Artificial; identical to SEQ ID NO: 604
  mutated AOP2

SEQ ID NO: 617 - protein, 457 aa, Brassica juncea
  misc_feature (15)..(15): Xaa can be any naturally occurring amino acid
MKHLWLTLAFLLALXTCKADEEITCEENLPFTCGQTDRFNSSSFEKDFIFGLASSAYQIEGSINRGVNVWDGFTHRFPDKAGPDHGNGDTTCNSYSYWEKDIEVMDELKATGYRFSIAWSRIIPGGKRSRGVHQGGINYYHGLINGLIDKGITPLVTLFHWDLPQVLQDDYEGFLDPQIDDFRDFADLCFEEYGDKVKHWFTINQLYSVPTRGYGLGSDAPGRCSPKVDSTCYAGNSSTEPYIVAHNQLLAHATVVDLYRTKYKHQGGKIGPVMITRWFLPYNDTDPDSIAATERMKEFFLGWYMGPLTNGTYPQIMIDTVGERLPSFTPEESKLVKGSYDFLGLNYYFTQYVQPSPNHVDSDGHTAMMDAGTRLTDRNASNHAIGPVETKNTYYYPKGIYYVMDHFKTNYNDPVIYITENLGFSTSGDETREEAKFDYRRIDYLCSHLCFLSKVIK

SEQ ID NO: 618 - protein, 457 aa, Brassica juncea
MKHLWLTLAFLLALATCKADEEITCEENLPFTCGQTDRFNSSSFEKDFIFGLASSAYQIEGSINRGVNVWDGFTHRFPDKAGPDHGNGDTTCNSYSYWEKDIEVMDELKATGYRFSIAWSRIIPGGKRSRGVHQGGINYYHGLINGLIDKGITPLVTLFHWDLPQVLQDDYEGFLDPQIDDFRDFADLCFEEYGDKVKHWFTINQLYSVPTRGYGLGSDAPGRCSPKVDSTCYAGNSSTEPYIVAHNQLLAHATVVDLYRTKYKHQGGKIGPVMITRWFLPYNDTDPDSIAATERMKEFFLGWYMGPLTNGTYPQIMIDTVGERLPSFTPEESKLVKGSYDFLGLNYYFTQYVQPSPNHVDSDGHTAMMDAGTRLTDRNASNHAIGPVETKNTYYYPKGIYYVMDHFKTNYNDPVIYITENLGFSTSGDETREEAKFDYRRIDYLCSHLCFLSKVIK

SEQ ID NO: 619 - protein, 457 aa, Brassica juncea; identical to SEQ ID NO: 618

SEQ ID NO: 620 - protein, 460 aa, Brassica juncea
MKLLHGLALVFLLAAASCKADEEITCEENNPFTCSNTDILSSKNFGKDFIFGVASSAYQIEGGRGRGVNIWDGFSHRYPEKSGSDLKNGDTTCESYTRWQKDVDVMGELNATGYRFSFAWSRIIPEGKVSRGVNQGGLDYYHKLIDALLEKNITPFVTLFHWDLPQTLQDEYEGFLDRQIQDFKDYADLCFKEFGGKVKHWITINQLYTVPTRGYAVGTDAPGRCSPMVDTKHRCYGGNSSTEPYIVAHNQLLAHATVVDLYRTKYKFQKGKIGPVMITRWFLPFDESDPASIEAAERMNQFFHGWYMEPLTKGRYPDIMRQIVGSRLPNFTEEEAALVAGSYDFLGLNYYVTQYAQPKPNPYPSETHTAMMDAGVKLTDDNSRGEFLGPLVNGNSYYYPKGIYYVMDYFKTKYGDPLIYVTENLGFSTPSEENREQAIADYKRIDYLCSHLCFLRKVIK

SEQ ID NO: 621 - protein, 460 aa, Brassica juncea; identical to SEQ ID NO: 620

SEQ ID NO: 622 - protein, 460 aa, Brassica juncea; identical to SEQ ID NO: 620

SEQ ID NO: 623 - protein, 460 aa, Brassica juncea
  misc_feature (145)..(145): Xaa can be any naturally occurring amino acid
MKLLHGLALVFLLAAASCKADEEITCEENNPFTCSNTDILSSKNFGKDFIFGVASSAYQIEGGRGRGVNVWDGFSHRYPEKSGSDLKNGDTTCESYTRWQKDVDVMGELNATGYRFSFAWSRIIPEGKVSRGVNQGGLDYYHKLXDALLEKNITPFVTLFHWDLPQTLQDEYEGFLDRQIQDFKDYADLCFKEFGGKVKHWITINQLYTVPTRGYAVGTDAPGRCSPMVDTKHRCYGGNSSTEPYIVAHNQLLAHATVVDLYRTKYKFQKGKIGPVMITRWFLPFDESDPASIEAAERMNQFFHGWYMEPLTKGRYPDIMRQIVGSRLPNFTEEEAELVAGSYDFLGLNYYVTQYAQPKPNPYPSETHTAMMDAGVKLTDDNSRGEFLGPLVNGNSYYYPKGIYYVMDYFKTKYGDPLIYVTENLGFSTPSSENREQAIADYKRIDYLCSHLCFLRKVIK

SEQ ID NO: 624 - protein, 460 aa, Brassica juncea; identical to SEQ ID NO: 623
  misc_feature (145)..(145): Xaa can be any naturally occurring amino acid

SEQ ID NO: 625 - protein, 460 aa, Brassica juncea
MKLLHGLALVFLLAAASCKADEEITCEENNPFTCSNTDILSSKNFGKDFIFGVASSAYQIEGGRGRGVNVWDGFSHRYPEKSGSDLKNGDTTCESYTRWQKDVDVMGELNATGYRFSFAWSRIIPEGKVSRGVNQGGLDYYHKLIDALLEKNITPFVTLFHWDLPQTLQDEYEGFLDRQIQDFKDYADLCFKEFGGKVKHWITINQLYTVPTRGYAVGTDAPGRCSPMVDTKHRCYGGNSSTEPYIVAHNQLLAHATVVDLYRTKYKFQKGKIGPVMITRWFLPFDESDPASIEAAERMNQFFHGWYMEPLTKGRYPDIMRQIVGSRLPNFTEEEAELVAGSYDFLGLNYYVTQYAQPKPNPYPSETHTAMMDAGVKLTDDNSRGEFLGPLVNGNSYYYPKGIYYVMDYFKTKYGDPLIYVTENLGFSTPSSENREQAIADYKRIDYLCSHLCFLRKVIK

SEQ ID NO: 626 - protein, 460 aa, Brassica juncea; identical to SEQ ID NO: 96

SEQ ID NO: 627 - protein, 460 aa, Brassica juncea; identical to SEQ ID NO: 96

SEQ ID NO: 628 - protein, 460 aa, Brassica juncea; identical to SEQ ID NO: 96

SEQ ID NO: 629 - protein, 460 aa, Brassica juncea
MKLLHGLALVFLLAAASCKADEEITCEENNPFTCSNTDILSSKNFGKDFIFGVASSAYQIEGGRGRGVNVWDGFSHRYPEKAGSDLKNGDTTCESYTRWQKDVDVMGELNATGYRFSFAWSRIIPEGKVSRGVNQGGLDYYHKLIDALLEKNITPFVTLFHWDLPQTLQDEYEGFLDRQIQDFKDYADLCFKEFGGKVKHWITINQLYTVPTRGYAIGTDAPGRCSPMVDTKHRCYGGNSSTEPYIVAHNQLLAHATVVDLYRTKYKFQKGKIGPVMITRWFLPYDESDPASIEAAERMNQFFHGWYMEPLTKGRYPDIMRQIVGSRLPNFTEEEAELVAGSYDFLGLNYYVTQYAQPKPNPYPSETHTAMMDAGVKLTDDNSRGEFLGPLVNGNSYYYPKGIYYVMDYFKTKYGDPLIYVTENLGFSTPSSENREQAIADYKRIDYLCSHLCFLRKVIK

SEQ ID NO: 630 - protein, 460 aa, Brassica juncea; identical to SEQ ID NO: 103

SEQ ID NO: 631 - protein, 460 aa, Brassica juncea; identical to SEQ ID NO: 629

SEQ ID NO: 632 - protein, 459 aa, Brassica juncea; identical to SEQ ID NO: 97

SEQ ID NO: 633 - protein, 459 aa, Brassica juncea; identical to SEQ ID NO: 97

SEQ ID NO: 634 - protein, 459 aa, Brassica juncea; identical to SEQ ID NO: 97

SEQ ID NO: 635 - protein, 460 aa, Brassica juncea; identical to SEQ ID NO: 98

SEQ ID NO: 636 - protein, 460 aa, Brassica juncea; identical to SEQ ID NO: 98

SEQ ID NO: 637 - protein, 460 aa, Brassica juncea; identical to SEQ ID NO: 98

SEQ ID NO: 638 - protein, 460 aa, Brassica juncea; identical to SEQ ID NO: 99

SEQ ID NO: 639 - protein, 460 aa, Brassica juncea; identical to SEQ ID NO: 99

SEQ ID NO: 640 - protein, 460 aa, Brassica juncea; identical to SEQ ID NO: 99

SEQ ID NO: 641 - protein, 460 aa, Brassica juncea
MKLLRRLALVFLLAAASCKADEEITCEENNPFTCSNTDILSSKNFGKDFIFGVASSAYQIEGGRGRGVNVWDGFSHRYPEKAGSDLKNGDTTCESYTRWQKDVDVMGEINATGYRFSFAWSRIIPEGKVSRGVNQGGLDYYHQLIDALLEKNITPFVTLFHWDLPQTLQDEYEGFLDRQIQDFKDYADLCFKEFGGKVKHWITINQLYTVPTRGYAVGTDAPGRCSPMVDTKHRCYGGNSSTEPYIVAHNQLLAHAAVVDLYRTKYKFQNGKIGPVMITRWFLPYDESDPACIEAAERMNQFFHGWYMEPLTKGRYPDIMRQIVGSRLPNFTEEEAALVAGSYDFLGLNYYVTQYARPQPNPYPSETHTAMMDAGVKLTDDNSRGEILGPLVNGNSYYYPKGIYYVMDFFKTNYSNPLIYITENLGISSPSTESRCEAIADYKRIDYLCSHLCFLRKVIK

SEQ ID NO: 642 - protein, 460 aa, Brassica juncea; identical to SEQ ID NO: 641

SEQ ID NO: 643 - protein, 460 aa, Brassica juncea; identical to SEQ ID NO: 641

SEQ ID NO: 644 - protein, 458 aa, Brassica juncea; identical to SEQ ID NO: 101

SEQ ID NO: 645 - protein, 458 aa, Brassica juncea; identical to SEQ ID NO: 101

SEQ ID NO: 646 - protein, 458 aa, Brassica juncea; identical to SEQ ID NO: 101

SEQ ID NO: 647 - protein, 458 aa, Brassica juncea
MKLHGLALIGFLIAAASCKAIEDINCQENEPFTCGNTDQLSSKNFPKDFIFGVASAAYQVEGGRGRGLNVWDGFTHRYPEKGGSDLGNGDTTCESYTRWQKDIDIMDELNATGYRFSFAWSRIIPEGKVSRGVNKGGLEYYHKLIDGLVAKNITPFVTLYHWDLPQTLQDEYEGFLNRTIDDFRDYADLCFKEFGGKVKNWITINQLYTVPTRGYAIGTDAPGRCSPKVDERCYGGNSSTEPYIVAHNQLLAHAAAVDVYRTKYKFQGGKIGPVMITRWFLPFDETDKASLYAADRMKEFFLGWFMEPLTKGRYPDIMRQIVGSRLPNFTEAEAELVAGSYDFLGLNYYTTQYAQPKPNPVTWENHTAMMDPGAKLTDTNSRGENLGPLINGDSYYYPKGIYYVMDYFKTKYRNPLIYITENLGFSTPGEETREEAIADSKRIDYLCSHLCFLRKVIR

SEQ ID NO: 648 - protein, 458 aa, Brassica juncea; identical to SEQ ID NO: 647

SEQ ID NO: 649 - protein, 458 aa, Brassica juncea
  misc_feature (379)..(379): Xaa can be any naturally occurring amino acid
MKLHGLALIGFLIAAASCKAIEDINCQENEPFTCGNTDQLSSKIFPKDFIFGVASAAYQVEGGRGRGLNVWDGFTHRYPEKGGSDLGNGDTTCESYTRWQKDIDIMDELNATGYRFSFAWSRIIPEGKVSRGVNKGGLEYYHKLIDGLVAKNITPFVTLYHWDLPQTLQDEYEGFLNRTIDDFRDYADLCFKEFGGKVKNWITINQLYTVPTRGYAIGTDAPGRCSPKVDERCYGGNSSTEPYIVAHNQLLAHAAAVDVYRTKYKFQGGKIGPVMITRWFLPFDETDKASLYAADRMKEFFLGWFMEPLTKGRYPDIMRQIVGSRLPNFTEAEAELVAGSYDFLGLNYYTTQYAQPKPNPVTWENHTAMMDPGAKLTDXNSRGENLGPLINGDSYYYPKGIYYVMDYFKTKYRNPLIYITENLGFSTPGEETREEAIADSKRIDYLCSHLCFLRKVIR

SEQ ID NO: 650 - protein, 459 aa, Brassica juncea
MKLLGLALVFLLASASCKADEEITCEENNPFTCSNTDILSSKNFGKDFIFGVASSAYQIEGGRGRGVNIWDGFSHRYPEKSGSDLKNGDTTCESYTRWQKDVDVMGELNATGYRFSFAWSRIIPEGKVSRGVNQGGLDYYHKLIDALLEKNITPFVTLFHWDLPQTLQDEYEGFLDRQIQDFKDYADLCFKEFGGKVKHWITINQLYTVPTRGYAVGTDAPGRCSPMVDTKHRCYGGNSSTEPYIVAHNQLLAHATVVDLYRTKYKFQKGKIGPVMITRWFLPFDESDPASIEAAERMNQFFHGWYMEPLTKGRYPDIMRQIVGSRLPNFTEEEAQLVAGSYDFLGLNYYVTQYAQPKPNPYPSETHTAMMDAGVKLTDDNSRGEFLGPLDNGNSYYYPKGIYYVMDYFKTNYGNPLIYVTENLGFSTPSSENREQAIADYKRIDYLCSHLCFLRKVIK

SEQ ID NO: 651 - protein, 459 aa, Brassica juncea; identical to SEQ ID NO: 650

SEQ ID NO: 652 - protein, 459 aa, Brassica juncea; identical to SEQ ID NO: 650

SEQ ID NO: 653 - protein, 457 aa, Brassica juncea; identical to SEQ ID NO: 104

SEQ ID NO: 654 - protein, 457 aa, Brassica juncea; identical to SEQ ID NO: 104

SEQ ID NO: 655 - protein, 457 aa, Brassica juncea; identical to SEQ ID NO: 104

SEQ ID NO: 656 - protein, 457 aa, Brassica juncea; identical to SEQ ID NO: 105

SEQ ID NO: 657 - protein, 457 aa, Brassica juncea; identical to SEQ ID NO: 105

SEQ ID NO: 658 - protein, 457 aa, Brassica juncea; identical to SEQ ID NO: 105

SEQ ID NO: 659 - protein, 428 aa, Brassica juncea
  misc_feature (187)..(187): Xaa can be any naturally occurring amino acid
  misc_feature (228)..(228): Xaa can be any naturally occurring amino acid
  misc_feature (264)..(264): Xaa can be any naturally occurring amino acid
MGSDSTPQLPVIYLSDQTLKPGSEKWVEVRNDVRKALEDYGAFEVSYDRVSEELKQSVLEAMKELFELPVEAKRRNVSPKPYTGYSTHNGLSESLGIQDAEVLEKVNEFTQLLRPDFEGNKSISETIQKFSEKLAELDVMVRRMVMESFGIEKYFDEHLKSTNYRLRLMKYIAPPDVDTNVAAGANXAGDGANDAGASDNANVVADTSDIASGIANVHINDDANIGAXANGDIGADVDAKTSDFASVESKADVSTNVNANADAXANTGTLSSAGVGDSVTANGGADDEEKKLGLPSHTDKNLFTVLYQYEIEGLEVLTKDEKWIRLKPSHNSFVVMAGDSVYALMNGRLFRPFHRVRVTEKKKTRYSIALFSTPNAGYIIEPPKELVDEKHPRVFKPFTYVDLMSFYHTEGGRRARSTLHAYCAVSEA

SEQ ID NO: 660 - protein, 428 aa, Brassica juncea
MGSDSTPQLPVIYLSDQTLKPGSEKWVEVRNDVRKALEDYGAFEVSYDRVSEELKQSVLEAMKELFELPVEAKRRNVSPKPYTGYSTHNGLSESLGIQDAEVLEKVNEFTQLLRPDFEGNKSISETIQKFSEKLAELDVMVRRMVMESFGIEKYFDEHLKSTNYRLRLMKYIAPPDVDTNVAAGANGAGDGANDAGASDNANVVADTSDIASGIANVHINDDANIGAKANGDIGADVDAKTSDFASVESKADVSTNVNANADADANTGTLSSAGVGDSVTANGGADDEEKKLGLPSHTDKNLFTVLYQYEIEGLEVLTKDEKWIRLKPSHNSFVVMAGDSVYALMNGRLFRPFHRVRVTEKKKTRYSIALFSTPNAGYIIEPPKELVDEKHPRVFKPFTYVDLMSFYHTEGGRRARSTLHAYCAVSEA

SEQ ID NO: 661 - protein, 427 aa, Brassica juncea
MGSDSTPQLPVIYLSDQTLKPGSEKWVEVRNDVRKALEDYGAFEVSYDRVSEELKQSVLEAMKELFELPVEAKRRNVSPKPYTGYSTHNGLSESLGIQDAEVLEKVNEFTQLLRPDFEGNKSISETIQKFSEKLAELDVMVRRMVMESFGIEKYFDEHLKSTNYRLRLMKYIAPPDVDTNVAAGANGAGDGANDAGASDNANVVADTSDIASGIANVHINDDANIGAKANGDIGADVDAKTSDFASVESKADVSTNVNANADADANTGTLSSAGVGDSVTANGGADDEKKLGLPSHTDKNLFTVLYQYEIEGLEVLTKDEKWIRLKPSHNSFVVMAGDSVYALMNGRLFRPFHRVRVTEKKKTRYSIALFSTPNAGYIIEPPKELVDEKHPRVFKPFTYVDLMSFYHTEGGRRARSTLHAYCAVSEA

SEQ ID NO: 662 - protein, 439 aa, Brassica juncea; identical to SEQ ID NO: 130

SEQ ID NO: 663 - protein, 439 aa, Brassica juncea
MGADTPQLPVIYLSDQTLKPGSEKWVEVRSDVRKALEDYGGFEVSYDRVSEELKKSVLDAMIELFELPVEAKQRNVSPKPYTGYSTHNGLSESLGIQNSNVLEKVNEFTQLLRPDCEGNKSMSETIQNFSEKLAELDVMVRRMVIESFGIENYFDEHLKSTNYRLRLMKYVAPPDVDANVAVGTKDSDDGANTNTTANADADDIANGIAKVHIDDDADAKGDVCTGAGTNHNGDDVNTGDCANVKSNVDVGTNVSAKSSVGADVNTGTIDDVNANAGTRSSANVGVSDSVKANGGADDEEKKLGLPSHTDKNLLTVLYQYEIEGLEVLTKDEKWIRLKPSHNSFVVMAGDSLYALMNGRLSRPFHRVRVTERKKTRYSIALFSTPNGDYIIEPPKELVDEKHPRLFKPFTYVDLMSFYHTEAGRRARSTLHAYCAVSGA

SEQ ID NO: 664 - protein, 439 aa, Brassica juncea; identical to SEQ ID NO: 130

SEQ ID NO: 665 - protein, 439 aa, Brassica juncea
  misc_feature (223)..(223): Xaa can be any naturally occurring amino acid
MGADTPQLPVIYLSDQTLKPGSEKWAEVRSGVRKALEEYGAFEVSYDRVTEELKKSVLDAMIELFELPVEAKQRNVSPKPYMGYSTHNGLSESLGIQDPNVLEKVNEFTQLLRPDCEGNKSMSETIQKFSEKLVELDVTVKRMVIQSFGIENYFDEHLKSLKNYRMRLMKYVAPPDVDAKDADDGANTNLNANADADAGAGDIANGIANVHIDEDVNAKGDVXTGGGDANHNGDDANTGDSASVKSNVDVGTDVNVKASVGADVNVGTIADANANIGTLSSANVGVGDSVKANGGADDEEKKLGLPSHTDKNLLTVLYQYEIDGLEVLTKDEKWIRLKPAHNSFVVIAGDSLYALMNGRLSRPFHRVRVTERKKTRYSIALFSAPDGDYIIEPPKELVDEKHPRLFKPFTYADLMSFYHTEAGRRSRSTLDAYSAVSGA

SEQ ID NO: 666 - protein, 439 aa, Brassica juncea; identical to SEQ ID NO: 132

SEQ ID NO: 667 - protein, 439 aa, Brassica juncea
MGADTPQLPVIYLSDQTLKPGSEKWAEVRSGVRKALEEYGAFEVSYDRVTEELKKSVLDAMIELFELPVEAKQRNVSPKPYMGYSTHNGLSESLGIQDPNVLEKVNEFTQLLRPDCEGNKSMSETIQKFSEKLVELDVTVKRMVIQSFGIENYFDEHLKSLKNYRMRLMKYVAPPDVDAKDADDGANTNLNANADADAGAGDIANGIANVHIDEDVNAKGDVCTGGGDANHNGDDANTGDSASVKSNVDVGTDVNVKASVGADVNVGTIADANANIGTLSSANVGVGDSVKANGGADDEEKKLGLPSHTDKNLLTVLYQYEIDGLEVLTKDEKWIRLKPAHNSFVVIAGDSLYALMNGRLSRPFHRVRVTERKKTRYSIALFSAPDGDYIIEPPKELVDEKHPRLFKPFTYADLMSFYHTEAGRRSRSTLDAYSAVSGA

SEQ ID NO: 668 - protein, 434 aa, Brassica juncea
MGSDSTPQLPVIYLSDQTLKPGSEKWVEVRSDVRKALEDYGAFEVSYDRVSEELKESVLEAMKELFDLPVEAKQRNVSPKPYTGYSTHNGLSESLGIQDAEVLEKVNEFTQLLRPDCEGNKSIRETIQKFSEKLAELDVMVRRMVMESFGIEKYFDEHLKSTNYRLRLMKYIAPPEVDTNVAVGANDAGDGANDASASDKANVVAGDEDNVGADTSDIANGIANVHIDDDAKANGDIGADVDAKTSDCANVESKADVSTDVNANSDSNANTGTLSSASVGDIVKANGGADDEEKKLGLPSHTDKNLFTVLYQYEIEGLEVLTKDEKWIRLKPSHNSFVVMAGDSAYLQALMNGRLFRPFHRVRVTEKKKTRYSIALFSTPNAGNIIEPPKELVDEKHPRVFKPFTYVDLMSFYHTEAGRRARSTLHAYCAVSEA

SEQ ID NO: 669 - protein, 434 aa, Brassica juncea; identical to SEQ ID NO: 668

SEQ ID NO: 670 - protein, 434 aa, Brassica juncea; identical to SEQ ID NO: 668

SEQ ID NO: 671 - protein, 435 aa, Brassica juncea
MGSDSTPQLPVIHLSDQTLKPGSEKWVEVRSDVRKALEDYGAFEVSYDRVSEELKESVLEAMKELFQLPVEAKRRNVSPKPYTGYMTHNGISESLGIQDANVLEKVNEFTQLLRPDCEGNKSTRSVLLMAELDVMVRRMVFESFGIEDYFDENLKSMNYRLRLMKYSAPRDVDTNVAAGANDAGDAANTNNNGNTGADVGAGDSASTGDNDKVVASDDANAGADTNDIVVGIANVHIDDDANDVAKANGDVGAGVDANTNDCASVKSSADVDNVNANVSVGTNGDTNANVGADIEEKKLGLPSHTDKNLLTVLYQYEIEGLEVLTKDEKWIRVKPSHNTFVVIAGDSLHALMNGRLFLPFHRVRVTEKKKTRYSIGLFSTPNRDYIIEPPKELVDEQHPRVFKPLTYVDLMSFYHTEVGRRARSTLHAYCAVSGA

SEQ ID NO: 672 - protein, 435 aa, Brassica juncea; identical to SEQ ID NO: 671

SEQ ID NO: 673 - protein, 435 aa, Brassica juncea; identical to SEQ ID NO: 671

SEQ ID NO: 674 - protein, 516 aa, Brassica juncea
MASISLLGRILSRPTKTKDRSRQLPPGPPGWPILGNLPELMMTRPRHKYIDIALKGQKPEIACFNFAGTHAIVINSDEIAREALKERDADFADRPNLFNMRTIGGNHKSMGNSPYGEQFMKMKRVITTEIMSVKTLNMLVAARTVEADNLLAYLLSMYKRSETADVREFSRVYGYAVTMRLLFGRRHITKENVFSDEGRLGQAEKDHLDAIFETLNCLPSFSPADYLEKWFRGWNIDGQEERVVMYCNKVRSYNNPIIDERVELWREKGGKAAVEDWIDTFITLKDENGKYYITPDEVKAQCVEFCIAAIDNPANNMEWTLAEMLKNPEILKKALKELDEVVGRDRLVQESDIPNLNYLKACCRETFRIHPSAHYVPTHVARQDTTLGGYFIPKGSHIHVGRPGIGRSSKVWKDPLVYKPERHLEGDGISKELSLVESELRFVSFGTGRRGCVGVKVGTIMMVIMLARFLQAFNWKLHPGYGPLSLEEDDALLMAKPLLLSVEPRLAPNLYPKFCP

SEQ ID NO: 675 - protein, 516 aa, Brassica juncea
  misc_feature (301)..(301): Xaa can be any naturally occurring amino acid
MASISLLGRILSRPTKTKDRSRQLPPGPPGWPILGNLPELMMTRPRHKYIDIALKGQKPEIACFNFAGTHAIVINSDEIAREALKERDADFADRPNLFNMRTIGGNHKSMGNSPYGEQFMKMKRVITTEIMSVKTLNMLVAARTVEADNLLAYLLSMYKRSETADVREFSRVYGYAVTMRLLFGRRHITKENVFSDEGRLGQAEKDHLDAIFETLNCLPSFSPADYLEKWFRGWNIDGQEERVVMYCNKVRSYNNPIIDERVELWREKGGKAAVEDWIDTFITLKDENGKYYITPDEVKAXCVEFCIAAIDNPANNMEWTLAEMLKNPEILKKALKELDEVVGRDRLVQESDIPNLNYLKACCRETFRIHPSAHYVPTHVARQDTTLGGYFIPKGSHIHVGRPGIGRSSKVWKDPLVYKPERHLEGDGISKELSLVESELRFVSFGTGRRGCVGVKVGTIMMVIMLARFLQAFNWKLHPGYGPLSLEEDDALLMAKPLLLSVEPRLAPNLYPKFCP

SEQ ID NO: 676 - protein, 516 aa, Brassica juncea; identical to SEQ ID NO: 674

SEQ ID NO: 677 - protein, 541 aa, Brassica juncea
MTMMMMSLTTSLPYPFQILLVFILSIASITLLGRILSRPTKTKDRSRQLPPGPPGWPILGNLPELMKTRPRHKYFEIATKGQKPEIACFNFAGTHTIIINSDEIAREAFKERDADFADRPNTFNMRTIGGNHKSMGNTPTGEQFMKMKRVITSEIMSVKTLNMLVASRNIEADNLLAYLLSIYKRSETADVREISRNYGYAVTMRMMFGRRHVTKENVFSDEGRLGPAEKDHLDAIFETLNCLPSFSPADYLEKWFLGWNVDGLEERVTVNCNKVRSYNNPIIDERVELWREKGGKAAVEDWIDTFITLKDENGKYYITPDEVKGQCVEFCIAAIDNPANNMEWTLAEMLKNPEILKKALKELDEVVGRDRLVQESDIPNLNYLKACCRETFRVHPSAHYVPTHVARRDSTLGGYFIPKGSHIHVARPGIGRSSKVWKDPLVYKPERHLEGNGISKELSLVENEMRLVSFGTGRRGCIGVKVGTIMMVIMLARFLQAFNWKLHPSYGPLSLEEDDALLMAKPLLLSVEPRLAPNLYPKFYP

SEQ ID NO: 678 - protein, 541 aa, Brassica juncea; identical to SEQ ID NO: 115

SEQ ID NO: 679 - protein, 541 aa, Brassica juncea; identical to SEQ ID NO: 677

SEQ ID NO: 680 - DNA, 2361 bp, Brassica juncea
atgaagcatctttggctcacattagcttttctattggctttgkcgacttgcaaagctgatgaagaaattacttgcgaagagaacctgccattcacatgtggtcaaactgatcgtttcaacagtagcagtttcgagaaagacttcatcttcggtcttgcatcttctgcttaccaggcatgtaacatatatatatcaaccattagtattatgttgccagacgtcatattttacgtataaaacatcatatataaacattaaaatctaacgttgcatggttgtttcttttcatttcagatcgaaggtagcataaatcgtggagttaacgtttgggatggcttcactcaccgattcccacgtttgttttttgcatggttactcatcacatatacatattatgtcggttatatgtctccatgcacttatagttatgtatttatttaccatcagataaagcaggacccgatcatggaaatggagacactacttgtaactcatattcgtactgggaggtaattaaattcctcaatatatatgtgtgtgcatattaatattactcactgaattatttatcaactaccaacctagtgtggattgacatgcgattatatgtgaactgcagaaagatatagaggtgatggatgaactcaaagctactggctacagattctccattgcctggtcaagaatcattccaagtatgtgaacgttattgatccatgtatatatataaatcgtatatggtaatattcgattatgattctttcgaaagattaaatataggatacatatgagcaggaggaaagaggagcaggggagtacaccaaggaggtattaactactaccacggactcataaatggcctcatcgacaagggtataacgcctttagttacgctctttcactgggaccttcctcaagtactacaagatgactatgaaggtttcttggaccctcagatcatgtatgctatatttatgccatgctgcttattaagaaagacgacaatatataaagatttgttcttggattaatgaaatgactataatattcgcagagatgatttcagagatttcgcggatctatgttttgaagaatatggtgataaagtaaagcactggttcacaatcaaccagctctactcagtgcctacgagaggctatggattaggatcagatgcacctggtcgatgttctccaaaggttgattctacatgttacgccggaaattcttcaacggaaccctatattgttgcacataaccagctccttgctcatgccacggtggtcgatctttacaggacaaaatataaggcaggttctccattttatgaaaggtgtattatctgattctaaattaatcttatcgttgggtatatatatctgcgtgaccacagcatcaaggaggtaagattggacctgtgatgataactagatggtttcttccatataatgacactgatccagactccatagctgcaaccgagaggatgaaagaattcttcttgggatggtatatgttttataaaatgaaatgatatacttaacatgaatatatgctgtatatatgaactgacgaaaaatatgtatttatatgtacaccaggtacatggggccgctaacaaatggtacataccctcaaatcatgatagacactgtgggtgagcggcttccatcgttcactccagaggaatccaaactcgtaaagggttcatatgattttcttggtctcaactattacttcactcagtatgtccagccaagtcctaatcatgttgattcggatggtcacactgccatgatggacgctggcacaaggctcacatgtatccatctatatatttcgacttagttacaaccttaatttatatctacctaacgccttttgttaattacaataatttgtgttaacagatcgtaatgcaagtaatcatgccattggcccagtggtatatatatatatatgcatcaaccatccctattctttcattcttttttctaagcaaaattcagttttctgatactaatttgcttccctttctaagttcactgaacacaaagatgacgagaccaaaaacacctattactacccaaaaggcatttattatgtgatggatcacttcaaaaccaattacaatgaccctgtaatctatataaccgagaacggtgggttctactactcatctctaaattcatctttacatgttaaatgtaatttgaaatttgttgaaattgttcatgttatgacggttaactaggattcagtacctccggtgatgaaacccgtgaggaggctaagtttgattacaggcggattgattatctctgcagtcatctctgtttcctcagtaaagtcatcaagtga

SEQ ID NO: 681 - DNA, 2361 bp, Brassica juncea
atgaagcatctttggctcacattagcttttctattggctttggcaacttgcaaagctgatgaagaaattacttgcgaagagaacctgccattcacatgtggtcaaactgatcgtttcaacagtagcagtttcgagaaagacttcatcttcggtcttgcatcttctgcttaccaggcatgtaacatatatatatcaaccattagtattatgttgccagacgtcatattttacgtataaaacatcatatataaacattaaaatctaacgttgcatggttgtttcttttcatttcagatcgaaggtagcataaatcgtggagttaacgtttgggatggcttcactcaccgattcccacgtttgttttttgcatggttactcatcacatatacatattaggtcggttatatgtctccatgcacttatagttatgtatttatttaccatcagataaagcaggacccgatcatggaaatggagacactacttgtaactcatattcgtactgggaggtaattaaattcctcaatatatatgtgtgtgcatattaatattactcactgaattatttatcgactaccaacctagtgtggattgacatgcgattatatgtgaactgcagaaagatatagaggtgatggatgaactcaaagctactggctacagattctccattgcctggtcaagaatcattccaagtatgtgaacgttattgatccatgtatatatataaatcgtatatggtaatattcgattatgattctttcgaaagattaaatataggatacatatgagcaggaggaaagaggagcaggggagtacaccaaggaggtattaactactaccacggactcataaatggcctcatcgacaagggtataacgcctttagttacgctctttcactgggaccttcctcaagtactacaagatgactatgaaggtttcttggaccctcagatcatgtatgctatatttatgccatgctgcttattaagaaagacgacaatatataaagatttgttcttggattaatgaaatgactataatattcgcagagatgatttcagagatttcgcggatctatgttttgaagaatatggtgataaagtaaagcactggttcacaatcaaccagctctactcagtgcctacgagaggctatggattaggatcagatgcacctggtcgatgttctccaaaggttgattctacatgttacgccggaaattcttcaacggaaccctatattgttgcacataaccagctccttgctcatgccacggtggtcgatctttacaggacaaaatataaggcaggttctccattttatgaaaggtgtattatctgattctaaattaatcttatcgttgggtatatatatctgcgtgaccacagcatcaaggaggtaagattggacctgtgatgataactagatggtttcttccatataatgacactgatccagactccatagctgcaaccgagaggatgaaagaattcttcttgggatggtatatgttttataaaatgaaatgatatacttaacatgaatatatgctgtatatatgaactgacgaaaaatatgtatttatatgtacaccaggtacatggggccgctaacaaatggtacataccctcaaatcatgatagacactgtgggtgagcggcttccatcgttcactccagaggaatccaaactcgtaaagggttcatatgattttcttggtctcaactattacttcactcagtatgtccagccaagtcctaatcatgttgattcggatggtcacactgccatgatggacgctggcacaaggctcacatgtatccatctatatatttcgacttagttacaaccttaatttatatctacctaacgccttttgttaattacaataatttgtgttaacagatcgtaatgcaagtaatcatgccattggcccagtggtatatatatatatatgcatcatccatccctattctttcattcttttttctaagcaaaattcagttttctgatactaatttgcttccctttctaagttcactgaacacaaagatgacgagaccaaaaacacctattactacccaaaaggcatttattatgtgatggatcacttcaaaaccaattacaatgaccctgtaatctatataaccgagaacggtgggttctactactcatctctaaattcatctttacatgttaaatgtaatttgaaatttgttgaaattgttcatgttatgacggttaactaggattcagtacctccggtgatgaaacccgtgaggaggctaagtttgattacaggcggattgattatctctgcagtcatctctgtttcctcagtaaagtcatcaagtga

SEQ ID NO: 682 - DNA, 2356 bp, Brassica juncea
atgaagcatctttggctcacattagcttttctattggctttggcgacttgcaaagctgatgaagaaattacttgcgaagagaacctgccattcacatgtggtcaaactgatcgtttcaacagtagcagtttcgagaaagacttcatcttcggtcttgcatcttctgcttaccaggcatgtaacatatatatatcaaccattagtattatgttgccagacgtcatattttacgtataaaacatcatatataaacattaaaatctaacgttgcatggttgtttcttttcatttcagatcgaaggtagcataaatcgtggagttaacgtttgggatggcttcactcaccgattcccacgtttgtttttttgcatggttactcatcacatatacatattatgtcggttatatgtctccatgcatttatagttatgtatttatttactatcagataaagcaggacccgatcatggaaatggagacactacttgtaactcatattcgtactgggaggtaattaaattcctcaatatatatgtgtgtgcatattaatattactcactgaattatttatcaactaccaacctagtgtggattgacatgcgattatatgtgaactgcagaaagatatagaggtaatggatgaactcaaagctactggctacagattctccattgcctggtcaagaatcattccaagtatgtgaacgttattgatccatgtatatatataaatcatatatggtaatattcgattatgattctttcgaaagattaaatataggatacatatgagcaggaggaaagaggagcaggggagtacaccaaggaggtattaactactaccacggactcataaatggcctcatcgacaagggtataacgcctttagttacgctctttcactgggaccttcctcaagtactacaagatgactatgaaggtttcttggaccctcagatcatgtatgttatatttatgccatgctgcttattaagaaggacgacaatatataaagatttgttctgggattaatgaaatgactataatattcgcagagatgatttcagagatttcgcggatctatgttttgaagaatatggtgataaagtaaagcactggttcacaatcaaccagctctactcagtgcctacgagaggctatggattaggatcagatgcacctggtcgatgttctccaaaggttgattctacatgttacgccggaaattcttcaacggaaccctatattgttgcacataaccagctccttgctcatgccacggtggtcgatctttacaggacaaaatataaggcaggttctccattttatgaaaggtgtattatctgattctaaattaatcttatcgttgggtatatatatctgcgtgaccacagcatcaaggaggtaagattggacctgtgatgataactagatggtttcttccatataatgacactgatccagactccatagctgcaaccgagaggatgaaagaattcttcttgggatggtatatgttttataaaatgaaatgatattcttaacatgaatatatgctgtatatatgaactgacgaaaaatatgtatttatatgtacaccaggtacatggggccgctaacaaatggtacataccctcaaatcatgatagacactgtgggtgagcggcttccatcgttcactccagaggaatccaaactcgtaaagggttcatatgattttcttggtctcaactattacttcactcagtatgtccagccaagtcctaatcatgttgattcggatggtcacactgccatgatggacgctggcacaaggctcacatgtatccatctatatatttcgacttagttacaaccttaatttatatctacctaacgccttttgttaattacaataatttgtgttaacagatcgtaatgcaagtaatcatgccattggcccagtggtatatatatgcatcaaccatccctattctttcattcttttttctaagcaaaattcagttttctgatactaatttgcttccctttctaagttcactgaacacaaagatgacgagaccaaaaacacctattactacccaaaaggcatttattatgtgatggatcacttcaaaaccaattacaatgaccctgtaatctatataaccgagaacggtgggttctactactcatctctaaattcatctttacatgttaaatgtaatttgaaatttgttgaaattgttcatgttatgacggttaactaggattcagtacctccggtgatgaaacccgtgaggaggctaagtttgattacaggcggattgattatctctgcagtcatctctgtttcctcagtaaagtcatcaagtga

SEQ ID NO: 683 - DNA, 2379 bp, Brassica juncea
atgaagcttcttcatggactcgctttagtttttctattagctgctgcgagttgcaaagctgatgaagaaattacttgcgaagagaacaatccattcacatgtagtaacactgatattttaagcagtaaaaacttcggaaaagacttcatcttcggtgttgcatcttctgcttaccaggcatgtaacaaatttttttgacgtataaataaatacaattcaaaaatactaaaatgcaacttcgcatggttgtttcttttcatttcagatcgaaggaggaagaggtcgtggtgttaacatttgggatggcttcagtcaccgatatccaggtacgtcacagtgtatatatacacatgagatgaacgtcggtttatatgtacacatattaatgtatttgtaactactatcagagaaatcagggtcagatttgaagaatggagacactacttgtgagtcatatacgagatggcaggttaatacattgatactcatatgactgaactatatatgtataaaaactatacgtgtggattgacatgtgattaaaatatgtaaaccgcagaaagatgtagacgtgatgggcgaactcaatgctactggctacaggttctcctttgcgtggtcaagaatcattccaagtatgtacatgttatcgattcgtttgtattttaattgggatcatttagttgagaaaagtactaattaatgtacgacatatatatacatgagcagaaggaaaggtgagtaggggagtgaaccaaggaggtcttgattactaccacaaactcatagatgcactactcgaaaagaatataacgcctttcgttaccctctttcactgggaccttcctcaaacactccaagatgagtatgaaggtttcttagaccgccagatcatgtatgtttatatttgttccatgcttcttatattataaataagagaagaaaacgttttggttttagttacatgcattaatgaaatgattctatataatatgcacagacaagatttcaaagactacgcggatctatgtttcaaagaatttggtggaaaggtaaagcactggatcacgatcaaccagctatacacagtccctacgagaggctatgcggtcggaacagatgcacccggtcgatgttctcctatggttgataccaagcacaggtgttacggtggaaattcttcaacagaaccctacatcgttgcacataaccagcttcttgctcatgccacggtcgtcgatctttacaggaccaaatataaggtgagtggtctctccatattaaggtggtgcaaatctaacatatctgattctaatgtatagtcatatatatatatatatcacgtgaccaacagtttcaaaaagggaagattggacctgtgatgataacaagatggtttcttccatttgatgagtctgatcctgcctccatagaagcagctgagaggatgaaccaattctttcatggatggtatatatatatattacagaacaatgtaacagtatatagtgtatgtatgtataattaaaagatatacatggatcaggtacatggagccgctaacaaagggtagatacccagacatcatgaggcagattgtgggtagtaggcttcccaactttaccgaggaagaagccgcactcgttgccggttcatatgattttcttggtctcaactattacgtcactcagtacgcccagccaaaacctaacccatatccttcagagacacacactgccatgatggacgctggcgtaaagctcacatgtactagtctattaccactaattagatacagcctttctatacatataaatattcttttatctcctttttgttgcaacatactttgtgagtgaccatctgttatttcatccttgtgtttacagatgataactcacgtggtgaatttcttggtccactggtatatatcaatgatccaccccctaagatttgtttttctttcattttttcagttttcagtataacaaccctaattatgttttttaattgatgtgtatatttatttacttccattttcacagttcgttgaagacaaggtaaacggcaacagctattactacccaaaaggcatttactacgtaatggactacttcaaaaccaaatacggagaccctttaatctatgtcaccgagaacggtgagttttacgaactcttttcatytataccacataataattattgtattttgatattagtcgaagaaactgactttattgtggaatatttttaatgtggcggtttatttaggatttagtacccccagtgaagaaaaccgtgagcaggctattgccgattacaagcgaattgattatctctgcagtcatttatgttttctccgcaaggtcatcaagtga

SEQ ID NO: 684 - DNA, 2379 bp, Brassica juncea
atgaagcttcttcatggactcgctttagtttttctattagctgctgcgagttgcaaagctgatgaagaaattacttgcgaagagaacaatccattcacatgtagtaacactgatattttaagcagtaaaaacttcggaaaagacttcatcttcggtgttgcatcttctgcttaccaggcatgtaacaaatttttttgacgtataaataaatacaattcaaaaatactaaaatgcaacttcgcatggttgtttcttttcatttcagatcgaaggaggaagaggtcgtggtgttaacatttgggatggcttcagtcaccgatatccaggtacgtcacagtgtatatatacacatgagatgaacgtcggtttatatgtacacatattaatgtatttgtaactactatcagagaaatcagggtcagatttgaagaatggagacactacttgtgagtcatatacgagatggcaggttaatacattgatactcatatgactgaactatatatgtataaaaactatacgtgtggattgacatgtgattaaaatatgtaaaccgcagaaagatgtagacgtgatgggcgaactcaatgctactggctacaggttctcctttgcgtggtcaagaatcattccaagtatgtacatgttatcgattcgtttgtattttaattgggatcatttagttgagaaaagtactaattaatgtacgacatatatatacatgagcagaaggaaaggtgagtaggggagtgaaccaaggaggtcttgattactaccacaaactcatagatgcactactcgaaaagaatataacgcctttcgttaccctctttcactgggaccttcctcaaacactccaagatgagtatgaaggtttcttagaccgccagatcatgtatgtttatatttgttccatgcttcttatattataaataagagaagaaaacgttttggttttagttacatgcattaatgaaatgattctgtataatatgcacagacaagatttcaaagactacgcggatctatgtttcaaagaatttggtggaaaggtaaagcactggatcacgatcaaccagctatacacagtccctacgagaggctatgcggtcggaacagatgcacccggtcgatgttctcctatggttgataccaagcacaggtgttacggtggaaattcttcaacagaaccctacatcgttgcacataaccagcttcttgctcatgccacggtcgtcgatctttacaggaccaaatataaggtgagtggtctctccatattaaggtggtgcaaatctaacatatctgattctaatgtatagtcatatatatatatatatcacgtgaccaacagtttcaaaaagggaagattggacctgtgatgataacaagatggtttcttccatttgatgagtctgatcctgcctccatagaagcagctgagaggatgaaccaattctttcatggatggtatatatatatattacagaacaatgtaacagtatatagtgtatgtatgtataattaaaagatatacatggatcaggtacatggagccgctaacaaagggtagatacccagacatcatgaggcagattgtgggtagtaggcttcccaactttaccgaggaagaagccgcactcgttgccggttcatatgattttcttggtctcaactattacgtcactcagtacgcccagccaaaacctaacccatatccttcagagacacacactgccatgatggacgctggcgtaaagctcacatgtactagtctattaccactaattagatacagcctttctatacatataaatattcttttatctcctttttgttgcaacrtactttrtgagtgaccatctgttatttcatccttgtgtttacagatgataactcacgtggtgaatttcttggtccactggtatatatcaatgatccaccccctaagatttgtttttctttcattttttcagttttcagtataacaaccctaattatgttttttaattgatgtgtatatttatttacttccattttcacagttcgttgaagacaaggtaaacggcaacagctattactacccaaaaggcatttactacgtaatggactacttcaaaaccaaatacggagaccctttaatctatgtcaccgagaacggtgagttttacgaactcttttcatttataccacataataattattgtattttgatattagtcgaagaaactgactttattgtggaatatttttaatgtggcggtttatttaggatttagtacccccagtgaagaaaaccgtgagcaggctattgccgattacaagcgaattgattatctctgcagtcatttatgttttctccgcaaggtcatcaagtga

SEQ ID NO: 685 - DNA, 2379 bp, Brassica juncea
atgaagcttcttcatggactcgctttagtttttctattagctgctgcgagttgcaaagctgatgaagaaattacttgcgaagagaacaatccattcacatgtagtaacactgatattttaagcagtaaaaacttcggaaaagacttcatcttcggtgttgcatcttctgcttaccaggcatgtaacaaatttttttgacgtataaataaatacaattcaaaaatactaaaatgcaacttcgcatggttgtttcttttcatttcagatcgaaggaggaagaggtcgtggtgttaacatttgggatggcttcagtcaccgatatccaggtacgtcacagtgtatatatacacatgagatgaacgtcggtttatatgtacacatattaatgtatttgtaactactatcagagaaatcagggtcagatttgaagaatggagacactacttgtgagtcatatacgagatggcaggttaatacattgatactcatatgactgaactatatatgtataaaaactatacgtgtggattgacatgtgattaaaatatgtaaaccgcagaaagatgtagacgtgatgggcgaactcaatgctactggctacaggttctcctttgcgtggtcaagaatcattccaagtatgtacatgttatcgattcgtttgtattttaattgggatcatttagttgagaaaagtactaattaatgtacgacatatatatacatgagcagaaggaaaggtgagtaggggagtgaaccaaggaggtcttgattactaccacaaactcatagatgcactactcgaaaagaatataacgcctttcgttaccctctttcactgggaccttcctcaaacactccaagatgagtatgaaggtttcttagaccgccagatcatgtatgtttatatttgttccatgcttcttatattataaataagagaagaaaacgttttggttttagttacatgcattaatgaaatgattctgtataatatgcacagacaagatttcaaagactacgcggatctatgtttcaaagaatttggtggaaaggtaaagcactggatcacgatcaaccagctatacacagtccctacgagaggctatgcggtcggaacagatgcacccggtcgatgttctcctatggttgataccaagcacaggtgttacggtggaaattcttcaacagaaccctacatcgttgcacataaccagcttcttgctcatgccacggtcgtcgatctttacaggaccaaatataaggtgagtggtctctccatattaaggtggtgcaaatctaacatatctgattctaatgtatagtcatatatatatatatatcacgtgaccaacagtttcaaaaagggaagattggacctgtgatgataacaagatggtttcttccatttgatgagtctgatcctgcctccatagaagcagctgagaggatgaaccaattctttcatggatggtatatatatatattacagaacaatgtaacagtatatagtgtatgtatgtataattaaaagatatacatggatcaggtacatggagccgctaacaaagggtagatacccagacatcatgaggcagattgtgggtagtaggcttcccaactttaccgaggaagaagccgcactcgttgccggttcatatgattttcttggtctcaactattacgtcactcagtacgcccagccaaaacctaacccatatccttcagagacacacactgccatgatggacgctggcgtaaagctcacatgtactagtctattaccactaattagatacagcctttctatacatataaatattcttttatctcctttttgttgcaacatactttgtgagtgaccatctgttatttcatccttgtgtttacagatgataactcacgtggtgaatttcttggtccactggtatatatcaatgatccaccccctaagatttgtttttctttcattttttcagttttcagtataacaaccctaattatgttttttaattgatgtgtatatttatttacttccattttcacagttcgttgaagacaaggtaaacggcaacagctattactacccaaaaggcatttactacgtaatggactacttcaaaaccaaatacggagaccctttaatctatgtcaccgagaacggtgagttttacgaactcttttcatytataccacataataattattgtattttgatattagtcgaagaaactgactttattgtggaatatttttaatgtggcggtttatttaggatttagtacccccagtgaagaaaaccgtgagcaggctattgccgattacaagcgaattgattatctctgcagtcatttatgttttctccgcaaggtcatcaagtga

SEQ ID NO: 686 - DNA, 2379 bp, Brassica juncea
atgaagcttcttcatggactcgctttagtttttctattagctgctgcgagttgcaaagctgatgaagaaattacttgcgaagagaacaatccattcacatgtagtaacactgatattttaagcagtaaaaacttcggaaaagacttcatcttcggtgttgcatcttctgcttaccaggcatgtaacaaatttttttgacgtataaataaatacaattcaaaaatactaaaatgcaacttcgcatggttgtttcttttcatttcagatcgaaggaggaagaggtcgtggtgttaacatttgggatggcttcagtcaccgatatccaggtacgtcacagtgtatatatacacatgagatgaacgtcggtttatatgtacacatattaatgtatttgtaactactatcagagaaatcagggtcagatttgaagaatggagacactacttgtgagtcatatacgagatggcaggttaatacattgatactcatatgactgaactatatatgtataaaaactatacgtgtggattgacatgtgattaaaatatgtaaaccgcagaaagatgtagacgtgatgggcgaactcaatgctactggctacaggttctcctttgcgtggtcaagaatcattccaagtatgtacatgttatcgattcgtttgtattttaattgggatcatttagttgagaaaagtactaattaatgtacgacatatatatacatgagcagaaggaaaggtgagtaggggagtgaaccaaggaggtcttgattactaccacaaactcatagatgcacttctcgaaaagaatataacgcctttcgttaccctctttcactgggaccttcctcaaacactccaagatgagtatgaaggtttcttagaccgccagatcatgtatgtttatatttgttccatgcttcttatattataaataagagaagaaaacgttttggttttagttacatgcattaatgaaatgattctgtataatatgcacagacaagatttcaaagactacgcggatctatgtttcaaagaatttggtggaaaggtaaagcactggatcacgatcaaccagctatacacagtccctacgagaggctatgcggtcggaacagatgcacccggtcgatgttctcctatggttgataccaagcacaggtgttacggtggaaattcttcaacagaaccctacatcgttgcacataaccagcttcttgctcatgccacggtcgtcgatctttacaggaccaaatataaggtgagtggtctctccatattaaggtggtgcaaatctaacatatctgattctaatgtatagtcatatatatatatatatcacgtgaccaacagtttcaaaaagggaagattggacctgtgatgataacaagatggtttcttccatttgatgagtctgatcctgcctccatagaagcagctgagaggatgaaccaattctttcatggatggtatatatatatattacagaacaatgtaacagtatatagtgtatgtatgtataattaaaagatatacatggatcaggtacatggagccgctaacaaagggtagatacccagacatcatgaggcagattgtgggtagtaggcttcccaactttaccgaggaagaagccttactcgttgccggttcatatgattttcttggtctcaactattatgttactcagtacgcccagccaaaacctaacccatatccttcagagacacacactgccatgatggacgctggcgtaaagctcacatgtactagtctattaccactaattagatacagcctttctatacatataaatattcttttatctcctttttgttgcaacatactttgtgagtgaccatctgttatttcatccttgtgtttacagatgataactcacgtggtgaatttcttggtccactggtatatatcaatgatccaccccctaagatttgtttttctttcattttttcagttttcagtataacaaccctaattatgttttttaattgatgtgtatatttatttacttccattttcacagttcgttgaagacaaggtaaacggcaacagctattactacccaaaaggcatttactacgtaatggactacttcaaaaccaaatacggagaccctttaatctatgtcaccgagaacggtgagttttacgaactctttttatttataccacataataattattgtattttgatattagtcgaagaaactgactttattgtggaatatttttaatgtggcggtttatttaggatttagtacccccagtgaagaaaaccgtgagcaggctattgccgattacaagcgaattgattatctctgcagtcatttatgttttctccgcaaggtcatcaagtga

SEQ ID NO: 687 - DNA, 2379 bp, Brassica juncea; identical to SEQ ID NO: 686

SEQ ID NO: 688 - DNA, 2379 bp, Brassica juncea; identical to SEQ ID NO: 686

SEQ ID NO: 689 - DNA, 2414 bp, Brassica juncea
atgaagcttcttcatggactcgctttagtttttctattagctgctgcgagttgcaaagctgatgaagaaattacttgcgaagagaacaacccattcacatgtagtaacactgatattttaagcagtaagaacttcggaaaagatttcatcttcggtgttgcatcttctgcttaccaggcatgtagcaaatgttgtcacaccataattttgaaataaaatttaaaacactaaaatgcaactttgcatggttgtttcttttcatttcagattgaaggagggagaggtcgtggtgttaacgtttgggatggcttcagtcaccgatacccaggtatgtcatttgcacagcgacatctatatttatatgtgagaggaatgttggttacatatactcatatagtcatattaatgtatttgtaactactatcagagaaatcagggtcagacttgaagaatggagacactacttgtgagtcctatacgagatggcaggttaatacattgatactcgtatgattgaactatatatgtataaaaactatacgtgtggaattgacatgtgattaaaatatgtaaactgcagaaagatgtagacgtgatgggcgaactcaatgctactggctacaggttctcctttgcgtggtcaagaatcattccaagtatgtacatgttatccattcgtttgtatwttaaytgggatcatttagttgaaaaagtactaattaatgtacgacatatatatacatgagcagaaggaaaggtgagtaggggagtgaaccaaggaggtcttgattactaccacaaactcwtagatgcactcctcgaaaagaatataacgcctttcgttaccctctttcactgggaccttcctcaaacactccaagatgagtatgaaggtttcttggaccgccagatcatgtatgtgccatgcagacatattatatatgaatttaagagattgattataaaattattaataaaaaagaagaaggtttggtcttatttaattacatgtattaactgaaataattatatattcatatgcagacaagatttcaaagattacgcggatctatgtttcaaagaatttggtggaaaggtaaagcactggatcacgatcaaccagttatacacagtccctacgagaggctatgckgtcggaacagatgcacccggtcgatgttctcctatggttgataccaagcacaggtgttacggtggaaattcttcaacagaaccctacatcgttgcacataaccagcttcttgctcatgccacggtcgtcgatctttacaggaccaaatacaaggtgagttgtctcaataygtgataaagatggtgtartgtaatctaagatatctgattctaacttagtcawatatcacgtraccaacagttccaaaaagggaagattggacctgtaatgattacaagatggtttcttccatttgatgagtctgatcctgcctccatagaagcagctgagaggatgaaccaattcttccatggatggtatatatatatatttatattaccaaaaatgtatcagtataaattgtatatatgtataatgaaaagatatacatggatcaggtacatggagccgctaacaaagggtagatacccagacatcatgaggcagattgtgggtagtaggcttcccaacttcaccgaggaagaagcagaactcgttgctggttcatatgattttcttggtctaaactattacgtcacccaatacgcccagccaaaacctaacccatatccttcagagacacacactgccatgatggacgctggcgtaaagctcacatgtacttttctattaccacttagttacaaccttttgatatatataaatgttttatctcctttttgtgagtgaccatcagttatttcattcttgtggttacagatgataattcacgtggtgaatttcttggtccactggtataatatgaatgatccacccctatgatttctaattcattttattttttcaattttcaatataagcaccactaattaggttttcttgattgatatgtatacgcttaactcccgtttctcagtttgttgaagacaaagtaaacggcaacagctattactacccaaaaggcatttattacgttatggactacttcaaaaccaaatacggcgaccctttaatctatgtcaccgaaaatggtgagttctacatgcatatattttcatctataacatctactataatttgtgtatttcgaaataattccaagaaactgactttcaaatattgtgtactttttcatgttatgtcggtttaattaggatttagtacccccagttcagaaaaccgtgagcaagctattgccgactacaagcgaatcgattatctatgcagccatctatgttttctccgcaaggtgatcaagtga

SEQ ID NO: 690 - DNA, 2414 bp, Brassica juncea
atgaagcttcttcatggactcgctttagtttttctattagctgctgcgagttgcaaagctgatgaagaaattacttgcgaagagaacaacccattcacatgtagtaacactgatattttaagcagtaagaacttcggaaaagatttcatcttcggtgttgcatcttctgcttaccaggcatgtagcaaatgttgtcacaccataattttgaaataaaatttaaaacactaaaatgcaactttgcatggttgtttcttttcatttcagattgaaggagggagaggtcgtggtgttaacgtttgggatggcttcagtcaccgatacccaggtatgtcatttgcacagcgacatctatatttatatgtgagaggaatgttggttacatatactcatatagtcatattaatgtatttgtaactactatcagagaaatcagggtcagacttgaagaatggagacactacttgtgagtcctatacgagatggcaggttaatacattgatactcgtatgattgaactatatatgtataaaaactatacgtgtggaattgacatgtgattaaaatatgtaaactgcagaaagatgtagacgtgatgggcgaactcaatgctactggctacaggttctcctttgcgtggtcaagaatcattccaagtatgtacatgttatccattcgtttgtatwttaaytgggatcatttagttgaaaaagtactaattaatgtacgacatatatatacatgagcagaaggaaaggtgagtaggggagtgaaccaaggaggtcttgattactaccacaaactcwtagatgcactcctcgaaaagaatataacgcctttcgttaccctctttcactgggaccttcctcaaacactccaagatgagtatgaaggtttcttggaccgccagatcatgtatgtgccatgcagacatattatatatgaatttaagagattgattataaaattattaataaaaaagaagaaggtttggtcttatttaattacatgtattaactgaaataattatatattcatatgcagacaagatttcaaagattacgcggatctatgtttcaaagaatttggtggaaaggtaaagcactggatcacgatcaaccagytatacacagtccctackagaggctatgcrgtyggaacagatgcaccmggtcgatgttctcctatggttgataccaagcacaggtgttacggtggaaattcttcaacagaaccctacatcgttgcacataaccagcttcttgctcatgccacggtcgtcgatctttacaggaccaaatacaaggtgagttgtctcaataygtgataaagatggtgtartgtaatctaagatatctgattctaacttagtcawatatcacgtraccaacagttccaaaaagggaagattggacctgtaatgattacaagatggtttcttccatttgatgagtctgatcctgcctccatagaagcagctgagaggatgaaccaattcttccatggatggtatatatatatatttatattaccaaaaatgtatcagtataaattgtatatatgtataatgaaaagatatacatggatcaggtacatggagccgctaacaaagggtagatacccagacatcatgaggcagattgtgggtagtaggcttcccaacttcaccgaggaagaagcagaactcgttgctggttcatatgattttcttggtctaaactattacgtcacccaatacgcccagccaaaacctaacccatatccttcagagacacacactgccatgatggacgctggcgtaaagctcacatgtacttttctattaccacttagttacaaccttttgatatatataaatgttttatctcctttttgtgagtgaccatcagttatttcattcttgtggttacagatgataattcacgtggtgaatttcttggtccactggtataatatgaatgatccacccctatgatttctaattcattttattttttcaattttcaatataagcaccactaattaggttttcttgattgatatgtatacgcttaactcccgtttctcagtttgttgaagacaaagtaaacggcaacagctattactacccaaaaggcatttattacgttatggactacttcaaaaccaaatacggcgaccctttaatctatgtcaccgaaaatggtgagttctacatgcatatattttcatctataacatctactataatttgtgtatttcgaaataattccaagaaactgactttcaaatattgtgtactttttcatgttatgtcggtttaattaggatttagtacccccagttcagaaaaccgtgagcaagctattgccgactacaagcgaatcgattatctatgcagccatctatgttttctccgcaaggtsatcaagtga

SEQ ID NO: 691 - DNA, 2414 bp, Brassica juncea
atgaagcttcttcatggactcgctttagtttttctattagctgctgcgagttgcaaagctgatgaagaaattacttgcgaagagaacaacccattcacatgtagtaacactgatattttaagcagtaagaacttcggaaaagatttcatcttcggtgttgcatcttctgcttaccaggcatgtagcaaatgttgtcacaccataattttgaaataaaatttaaaacactaaaatgcaactttgcatggttgtttcttttcatttcagattgaaggagggagaggtcgtggtgttaacgtttgggatggcttcagtcaccgatacccaggtatgtcatttgcacagcgacatctatatttatatgtgagaggaatgttggttacatatactcatatagtcatattaatgtatttgtaactactatcagagaaatcagggtcagacttgaagaatggagacactacttgtgagtcctatacgagatggcaggttaatacattgatactcgtatgattgaactatatatgtataaaaactatacgtgtggaattgacatgtgattaaaatatgtaaactgcagaaagatgtagacgtgatgggcgaactcaatgctactggctacaggttctcctttgcgtggtcaagaatcattccaagtatgtacatgttatccattcgtttgtatwttaattgggatcatttagttgaaaaagtactaattaatgtacgacatatatatacatgagcagaaggaaaggtgagtaggggagtgaaccaaggaggtcttgattactaccacaaactcatagatgcactcctcgaaaagaatataacgcctttcgttaccctctttcactgggaccttcctcaaacactccaagatgagtatgaaggtttcttggaccgccagatcatgtatgtgccatgcagacatattatatatgaatttaagagattgattataaaattattaataaaaaagaagaaggtttggtcttatttaattacatgtattaactgaaataattatatattcatatgcagacaagatttcaaagattacgcggatctatgtttcaaagaatttggtggaaaggtaaagcactggatcacgatcaaccagytatacacagtccctackagaggctatgcrgtyggaacagatgcacccggtcgatgttctcctatggttgataccaagcacaggtgttacggtggaaattcttcaacagaaccctacatcgttgcacataaccagcttcttgctcatgccacggtcgtcgatctttacaggaccaaatacaaggtgagttgtctcaataygtgataaagatggtgtartgtaatctaagatatctgattctaacttagtcawatatcacgtraccaacagttccaaaaagggaagattggacctgtaatgattacaagatggtttcttccatttgatgagtctgatcctgcctccatagaagcagctgagaggatgaaccaattcttccatggatggtatatatatatatttatattaccaaaaatgtatcagtataaattgtatatatgtataatgaaaagatatacatggatcaggtacatggagccgctaacaaagggtagatacccagacatcatgaggcagattgtgggtagtaggcttcccaacttcaccgaggaagaagcagaactcgttgctggttcatatgattttcttggtctaaactattacgtcacccaatacgcccagccaaaacctaacccatatccttcagagacacacactgccatgatggacgctggcgtaaagctcacatgtacttttctattaccacttagttacaaccttttgatatatataaatgttttatctcctttttgtgagtgaccatcagttatttcattcttgtggttacagatgataattcacgtggtgaatttcttggtccactggtataatatgaatgatccacccctatgatttctaattcattttattttttcaattttcaatataagcaccactaattaggttttcttgattgatatgtatacgcttaactcccgtttctcagtttgttgaagacaaagtaaacggcaacagctattactacccaaaaggcatttattacgttatggactacttcaaaaccaaatacggcgaccctttaatctatgtcaccgaaaatggtgagttctacatgcatatattttcatctataacatctactataatttgtgtatttcgaaataattccaagaaactgactttcaaatattgtgtactttttcatgttatgtcggtttaattaggatttagtacccccagttcagaaaaccgtgagcaagctattgccgactacaagcgaatcgattatctatgcagccatctatgttttctccgcaaggtgatcaagtga

SEQ ID NO: 692 - DNA, 2459 bp, Brassica juncea
atgaagcttcttcatggactcgctttagtttttctattagctgctgcgagttgcaaagctgatgaagaaattacttgcgaagagaacaatccattcacttgtagtaacactgatattttaagcagtaagaacttcggaaaagatttcatcttcggtgttgcatcttctgcttaccaggcatgtagcaaatgttgtcacaccctaattttgaaataaaatttaaaacactaaaatgcaactttgcatggttgcctcttttcatttcagatcgaaggagggagaggtcgtggtgttaacgtttgggatggcttcagtcaccgatacccaggtatgtcgtttgcacggtgacatctattttatatgtgagaggaatgttggttacatatacacatattaatgtatttgtaatttaatatcagagaaagctgggtcagatttgaagaatggagacactacttgtgagtcatatacgagatggcaggttaatttctcagtacattgatactcatgactgaactatagtatgtataaaaactatacgtgtggattgacatgagattaaaattaatatgtaaactgcagaaagatgtagacgtgatgggcgaactcaatgctactggctacagattctcctttgcgtggtcaagaatcattccaagtatgtacatattatcgatcaattatatatatatatatatatataaatatatattattttttttaattgggatgatttagttggaagagtactaattaaagtacgatgtatatatacatgagcagaaggaaaggtgagtaggggagtgaaccaaggaggccttgattactaccacaaactcatagatgcactcctcgaaaaaaatataacgcctttcgttaccctctttcactgggatcttcctcaaacactccaagatgagtatgaaggtttcttggaccgccagatcatgtatgtgccatccttcttaattatatctgaagagagtaaatataattagtgatagaagaagaatatttggtttaatttacatgtattactgaaatgattctatactaatatgcacagmcaagatttcaaagaytacgcggatctatgtttcaaagaatttggtggaaaggtaaagcaytggatcacgatcaaccagctatacacagtgcctacaagaggctatgckatcggaacagatgcaccmggtcgatgttctcctatggttgataccaagcacaggtgttacggyggaaattcttcaacagaaccctacatcgttgcacataaccagcttcttgctcatgccacggtcgtcgatctttacaggaccaaatataaggtgagtggcctccatatgtgaaaaggtggtctaaatctaacatatccgattctaatgtatagtcatatatatatcacgtgatgaacagttccaaaaagggaagattggacctgtgatgataactagatggtttcttccatatgatgaatctgatcctgcctccatagaagcagctgagaggatgaaccaattcttccatggatggtatatataattttatatattaccaaaaatgtatcagtttgtattttatgtattataatgaaacaaaaatatacttggatcaggtatatggagccgttaacaaagggtagatacccagacatcatgaggcagattgtgggtagtcggcttcccaacttcaccgaggaagaagcggaactcgttgctggttcatatgattttcttggtctcaactattacgtcactcagtacgcccagccaaaaccgaacccatatccttcagagacacacactgccatgatggacgctggcgtaaagctcacatgtactacaacattaccacttagttacaagctttctatatacatatatatatgtgctatctcctttttgttacaacatactttctgagtgaccatcaattatttcatccttgtgtttacagatgataattcacgtggtgaatttcttggtccactggtatatataaatgatcatccacccctttgatttctctttcaatttttttttctatttgcaatataacaccactttctccttgttaatatgtatatatatgtttgcttcctttctcagttcgttgaagacaaagtcaacggcaacagctattactacccaaaagggatttattacgtaatggactacttcaaaaccaaatacggcgacccattaatctatgtcaccgagaatggcgagttctacatacttccactactcatattttcatatataacatatcgtaattagtgtatttcgaaataaatccaagaaactgattttcaaatattgtatactttttcatgttatggcggttaattaggatttagtacccccagttcagaaaaccgtgagcaagctattgccgattacaagcgaattgattatctgtgcagtcatctatgttttctccgcaaggtcatcaagtga

SEQ ID NO: 693 - DNA, 2459 bp, Brassica juncea; identical to SEQ ID NO: 76

SEQ ID NO: 694 - DNA, 2459 bp, Brassica juncea
atgaagcttcttcatggactcgctttagtttttctattagctgctgcgagttgcaaagctgatgaagaaattacttgcgaagagaacaatccattcacttgtagtaacactgatattttaagcagtaagaacttcggaaaagatttcatcttcggtgttgcatcttctgcttaccaggcatgtagcaaatgttgtcacaccctaattttgaaataaaatttaaaacactaaaatgcaactttgcatggttgcctcttttcatttcagatcgaaggagggagaggtcgtggtgttaacgtttgggatggcttcagtcaccgatacccaggtatgtcgtttgcacggtgacatctattttatatgtgagaggaatgttggttacatatacacatattaatgtatttgtaatttaatatcagagaaagctgggtcagatttgaagaatggagacactacttgtgagtcatatacgagatggcaggttaatttctcagtacattgatactcatgactgaactatagtatgtataaaaactatacgtgtggattgacatgagattaaaattaatatgtaaactgcagaaagatgtagacgtgatgggcgaactcaatgctactggctacagattctcctttgcgtggtcaagaatcattccaagtatgtacatattatcgatcaattatatatatatatatatatataaatatatattattttttttaattgggatgatttagttggaagagtactaattaaagtacgatgtatatatacatgagcagaaggaaaggtgagtaggggagtgaaccaaggaggccttgattactaccacaaactcatagatgcactcctcgaaaaaaatataacgcctttcgttaccctctttcactgggatcttcctcaaacactccaagatgagtatgaaggtttcttggaccgccagatcatgtatgtgccatccttcttaattatatctgaagagagtaaatataattagtgatagaagaagaatatttggtttaatttacatgtattactgaaatgattctatactaatatgcacagccaagatttcaaagattacgcggatctatgtttcaaagaatttggtggaaaggtaaagcattggatcacgatcaaccagctatacacagtgcctacaagaggctatgcgatcggaacagatgcacccggtcgatgttctcctatggttgataccaagcacaggtgttacggcggaaattcttcaacagaaccctacatcgttgcacataaccagcttcttgctcatgccacggtcgtcgatctttacaggaccaaatataaggtgagtggcctccatatgtgaaaaggtggtctaaatctaacatatccgattctaatgtatagtcatatatatatcacgtgatgaacagttccaaaaagggaagattggacctgtgatgataactagatggtttcttccatatgatgaatctgatcctgcctccatagaagcagctgagaggatgaaccaattcttccatggatggtatatataattttatatattaccaaaaatgtatcagtttgtattttatgtattataatgaaacaaaaatatacttggatcaggtatatggagccgttaacaaagggtagatacccagacatcatgaggcagattgtgggtagtcggcttcccaacttcaccgaggaagaagcggaactcgttgctggttcatatgattttcttggtctcaactattacgtcactcagtacgcccagccaaaaccgaacccatatccttcagagacacacactgccatgatggacgctggcgtaaagctcacatgtactacaacattaccacttagttacaagctttctatatacatatatatatgtgctatctcctttttgttacaacatactttctgagtgaccatcaattatttcatccttgtgtttacagatgataattcacgtggtgaatttcttggtccactggtatatataaatgatcatccacccctttgatttctctttcaatttttttttctatttgcaatataacaccactttctccttgttaatatgtatatatatgtttgcttcctttctcagttcgttgaagacaaagtcaacggcaacagctattactacccaaaagggatttattacgtaatggactacttcaaaaccaaatacggcgacccattaatctatgtcaccgagaatggcgagttctacatacttccactactcatattttcatatataacatatcgtaattagtgtatttcgaaataaatccaagaaactgattttcaaatattgtatactttttcatgttatggcggttaattaggatttagtacccccagttcagaaaaccgtgagcaagctattgccgattacaagcgaattgattatctgtgcagtcatctatgttttctccgcaaggtcatcaagtga

SEQ ID NO: 695 - DNA, 2484 bp, Brassica juncea; identical to SEQ ID NO: 70

SEQ ID NO: 696 - DNA, 2484 bp, Brassica juncea; identical to SEQ ID NO: 70

SEQ ID NO: 697 - DNA, 2430 bp, Brassica juncea
atgaagcttcttgggctcgctttagtttttctgttagcttctgcgagttgcaaagctgacgaagaaattacttgtgaagagaacaatccattcacatgtagtaacactgatattttaagcagtaaaaacttcggaaaagacttcatcttcggtgttgcatcttctgcttaccaggcatgtaacaaatgttgacataccatactttttgacgtatagaaaacactattcaaaaatgataatatctaactttgcatggttgtttcttttcatttcagatcgaaggagggagaggtcgtggtgttaacatttgggatggcttcagtcaccgatacccaggtatgtcgtttgcacggtgacatctatatatatcatatatgacaggaatgttggttataagtactcatattaatgtatttgtaattactatcagagaaatcagggtcagatttgaagaatggagacactacttgtgagtcatatacgagatggcaggttaattcttcagtacatttctagatactcatgactgaactatgtatacaaactacgtgccgattgagatgcaatcaaaatatgaaactgcagaaagatgtagacgttatgggcgaactaaatgctactggctacagattttcctttgcgtggtcgagaatcattccaagtacgtacagattatcgatcagtacatgtatatatatagttggacgtgttttaaatgtacgatttatatatacatgagcagaaggaaaggtgagtaggggagtgaaccaaggaggtcttgattactaccacaaactcatagacgccctcctcgaaaagaatataactcctttcgttaccctctttcactgggaccttcctcaaacactccaagatgagtacgaaggtttcttggaccgccagatcatgtatgtttatatttgtgacatgcttcttatattattaataagagaagaaaaagatggttaattttagttacatgcattactgaaatgattctatattaatatgcacagacaagatttcaaagattatgccgatctatgtttcaaagaatttggtggaaaggtaaagcactggatcacgatcaaccagctatacacagtccctacgagaggctatgcagtcggaacagatgcacccggtcgatgttctcctatggttgatactaagcacaggtgttacggcggaaattcttcaacagaaccctatatcgttgcacataaccagcttcttgctcatgccacggtcgtcgatctttacaggaccaaatataaggtgaatgctgtctccatatgtgaaaattaaggtggtgtctaacatatctgattctaatgtaaatatcacgtgaccaacagttccaaaaagggaagattggacctgtgatgataacaagatggtttcttccatttgatgagtctgatccggcctccatagaagcagctgagaggatgaaccaattcttccatggatggtatatatatatattaccaaaaatgtaacagtatctactgtatttgtatgtatgtataatggaaaaatatacatggatcaggtacatggagccgctaacaaagggtagatacccagacatcatgaggcagattgtgggtagtaggcttcccaactttaccgaggaagaagccaaactcgttgccggttcatatgattttcttggtctcaactattacgtcactcagtacgcccagccaaaacctaacccatatccttcagagacacacactgccatgatggacgctggtgtaaagctcacatgtaagtaccacacaatattactacttagttacgacctttctatatattttttttcttctttttgttaacatactttgtgagagtatcaattatttcatccttgtgtttacagatgataattcgcgtggtgaatttcttggtccactggtatatatgaatgaaccacccctatgatatctctttcattttttattctatttgcaatatatagaacaccactgattatgttctcgtgattgatatgtatatttgtttgcttcccttgctcagttcgttgaagacaaagataacggaaacagctattactatccaaaaggaatttattacgtgatggactacttcaaaaccaactacggcaaccctttaatctatgtcaccgagaacggtgagttctacatactactactcctctattttcatttataccacgcataatattatgtaaccacaaaagtagacccatattcaatctaccgcagggtgaatagtaatgaaaataattgtaaaagttattttacaattattgtattttcgaaattggtccaagaaactaacttacaaatattgtgtaatatttttcatgcaatggcggcttaattaggatttagtacgcccagttcagaaaaccgtgagcaggctattgcggattacaag

SEQ ID NO: 698 - DNA, 2484 bp, Brassica juncea
atgaagcttcttgggctcgctttagtttttctgttagcttctgcgagttgcaaagctgacgaagaaattacttgtgaagagaacaatccattcacatgtagtaacactgatattttaagcagtaaaaacttcggaaaagacttcatcttcggtgttgcatcttctgcttaccaggcatgtaacaaatgttgacataccatactttttgacgtatagaaaacactattcaaaaatgataatatctaactttgcatggttgtttcttttcatttcagatcgaaggagggagaggtcgtggtgttaacatttgggatggcttcagtcaccgatacccaggtatgtcgtttgcacggtgacatctatatatatcatatatgacaggaatgttggttataagtactcatattaatgtatttgtaattactatcagagaaatcagggtcagatttgaagaatggagacactacttgtgagtcatatacgagatggcaggttaattcttcagtacatttctagatactcatgactgaactatgtatacaaactacgtgccgattgagatgcaatcaaaatatgaaactgcagaaagatgtagacgttatgggcgaactaaatgctactggctacagattttcctttgcgtggtcgagaatcattccaagtacgtacagattatcgatcagtacatgtatatatatagttggacgtgttttaaatgtacgatttatatatacatgagcagaaggaaaggtgagtaggggagtgaaccaaggaggtcttgattactaccacaaactcatagacgccctcctcgaaaagaatataactcctttcgttaccctctttcactgggaccttcctcaaacactccaagatgagtacgaaggtttcttggaccgccagatcatgtatgtttatatttgtgacatgcttcttatattattaataagagaagaaaaagatggttaattttagttacatgcattactgaaatgattctatattaatatgcacagacaagatttcaaagattatgccgatctatgtttcaaagaatttggtggaaaggtaaagcactggatcacgatcaaccagctatacacagtccctacgagaggctatgcagtcggaacagatgcacccggtcgatgttctcctatggttgatactaagcacaggtgttacggcggaaattcttcaacagaaccctatatcgttgcacataaccagcttcttgctcatgccacggtcgtcgatctttacaggaccaaatataaggtgaatgctgtctccatatgtgaaaattaaggtggtgtctaacatatctgattctaatgtaaatatcacgtgaccaacagttccaaaaagggaagattggacctgtgatgataacaagatggtttcttccatttgatgagtctgatccggcctccatagaagcagctgagaggatgaaccaattcttccatggatggtatatatatatattaccaaaaatgtaacagtatctactgtatttgtatgtatgtataatggaaaaatatacatggatcaggtacatggagccgctaacaaagggtagatacccagacatcatgaggcagattgtgggtagtaggcttcccaactttaccgaggaagaagcccaactcgttgccggttcatatgattttcttggtctcaactattacgtcactcagtacgcccagccgaaacctaacccatatccttcagagacacacactgccatgatggacgctggtgtaaagctcacatgtaagtaccacacaatattactacttagttacgacctttctatatattttttttcttctttttgttaacatactttgtgagagtatcaattatttcatccttgtgtttacagatgataattcgcgtggtgaatttcttggtccactggtatatatgaatgaaccacccctatgatatctctttcattttttattctatttgcaatatatagaacaccactgattatgttctcgtgattgatatgtatatttgtttgcttcccttgctcagttcgttgaagacaaagataacggaaacagctattactatccaaaaggaatttattacgtgatggactacttcaaaaccaactacggcaaccctttaatctatgtcaccgagaacggtgagttctacatactactactcctctattttcatttataccacgcataatattatgtaaccacaaaagtagacccatattcaatctaccgcagggtgaatagtaatgaaaataattgtaaaagttattttacaattattgtattttcgaaattggtccaagaaactaacttacaaatattgtgtaatatttttcatgcaatggcggcttaattaggatttagtacgcccagttcagaaaaccgtgagcaggctattgcggattacaagcgaattgattatctctgcagtcatctatgttttctccgtaaggtcatcaagtaa

SEQ ID NO: 699 - DNA, 2484 bp, Brassica juncea; identical to SEQ ID NO: 698

SEQ ID NO: 700 - DNA, 2484 bp, Brassica juncea; identical to SEQ ID NO: 698

SEQ ID NO: 701 - DNA, 2502 bp, Brassica juncea
atgaagcttcttcatggacttgctttagttttcctattagctgcttcgagttgcaaagctgatgaagaaattacatgtgaagagaacactccattcacatgtggtaacactgatattttaagcagtaaaaactttggaaaagacttcatcttcggtgttgcatcttctgcttaccaggcatgtaacaaatgttgacataccatactataaataaatacaattcaaagagctaatttccaactttgcatggttgtttattttcctttcagatcgaaggagggagaggtcgtggtgttaacatttgggatggcttcagtcaccgatacccaggtatgtcgtttttgcacggtgacgtacgtgtgtatatatatatatatatataatgtacacatattaaagcatttgtaattactatcagagaaatcagggtcagatttgatgaatggagacactacttgtgagtcatatacgagatggcaggtcagtacattgatactcacatgactgaactatgtataaaaaaacctatacgtgtgattgttgacatgccattaaaatatgtaaactgcagaaagatgtagacattatgggagaactcaatgctactggctacagattctcctttgcgtggtcaagaatcattccaagtatgtacatattattgattgttcgtaattgggatcgtttagttggaaaagtactgattaatgttttggcaaaaaaaaaagtactgattaatgtacaatatatatatgtatgcacgagcagaaggaaaagtgagtaggggagtgaaccaaggaggtcttgattactaccaccaactcatagacgccctcctagaaaagaatataacgcctttcgttaccctcttccactgggaccttcctcaaacactccaagatgagtatgaaggtttcttagaccgccagatcatgtatgtttatatttttgccatgcttcttatattattaataaaagacgaaaaagatttggttttagtaacatgcattactgaaatgattatacaataatatgcacagacaagatttcaaagattacgcggatctatgtttcaatgaatttggtggaaaggtaaagcactggatcacgatcaaccagctatatacagtgccgacaagaggctatgcgagcggaacagatgcacccggtcgatgttcttatatggttgataccaagcacaggtgttacggcggaaattcttcaacagaaccctacatcgttgcacataaccagcttcttgctcatgccgcagttgtcgatctttacaggaccaaatataaggtgagtggtgctccatatgtgaaaattagggtggtgtaaatctaacatatatctgattctaatgtatagtcatatatatgtatcacgtgaccaacagttccaaaacgggaagattggacctgtgatgataacaagatggtttcttccatttgatgagtctgatcctgcttgcgtagaagcagctgagaggatgaaccaatttttccatggatggtatttatatatatatatatatatatatatatgtgtgtgtgtgtattaccaacaatgtatcagtatgtattttatgtatttataatgaaacaaaaatatacatggatgatggatcaggtacatggagccgctaacaaagggtagatacccagacatcatgaggcagatcgtgggtagtaggctccccaactttaccgaggaagaagccgcactcgttgctggttcatatgattttcttggtctcaactattacgtcactcagtacgcccagccacaacctaacccatatccttcagagacacacactgccatgatggaccctggtgtaaagctcacatgtacgtacttcagtaatattaccacttagtacttatcaaaaaaaaaaaaaattaccacttagttacaacctttctatatatgtttttctccttttgttaacatactttgtgagtgactatcaattatttcatccttgtgtttacagataataattcacgtggtgaattacttggtccactggtaatatatgaatgatccacctctacgatttctcttttttttaatcaatattttctatttgcaatagaacaccactgattatgttctcttgattgatatgtatattttgtttggttccctttctcagttcgctgaagacaaggttaacggcaacagctattactacccaaaaggaatgtattacgtaatggacttcttcaaaaccaattacagcaaccctttaatatatatcaccgagaacggtgagttctacatactacttactactcatctattctacataaattaactagtgtattttatatattagtccaggaaactgactttcaaatatcgtggaatgttttcatggtttaattaggaattagttcgcccggtacagaaaaccgttgcgaagctattgccgattacaagcgaatcgattatctctgcagtcatctctgttttctccgtaaggtcatcaggtaa

SEQ ID NO: 702 - DNA, 2502 bp, Brassica juncea; identical to SEQ ID NO: 701

SEQ ID NO: 703 - DNA, 2502 bp, Brassica juncea; identical to SEQ ID NO: 701

SEQ ID NO: 704 - DNA, 2431 bp, Brassica juncea
atgaagcttcttcatggactcgctttagtttttctattagctactacgagttgcaaagcagatgaagaaattacttgcgaagagaacaatccattcacctgtagtaacactgatatattaagcagtaagaacttcggaaaaaatttcatcttcggtgttgcatcttctgcttaccaggcatgtagcaaatgttgtcataccccacttttgaaataaattttaaagcactaaaatgcaactttgcatggttgttcttcttatttagatagaaggagggagaggtcgtggtgttaacgtttgggatggcttcagtcaccggtacccaggtatgtggtttgcacggtgacatatatatttatatgcgagaggaatgttggttacatatacacatattaatgtatttgtaactaaaatcagagaaagctgggtcagatttgaagaatggagacactacttgtgagtcatatacgagatggcaggttaatttctcagtacattaatactcatgactgaactatatatgtataaaaactatacgtgtggattgacatgagactaaaattaatatgtaaactgcagaaagatgtagacgtgatgggcgaaatcaatgctactggctacagattctcctttgcatggtcaagaatcattccaagtatgtacatatcaacgatcaatgtatatatatctttgtattttaattgggataatttagttggaaaggtactaattaatgtacgatatatatctacccgagcagaaggaaaggtgagtaggggagtgaaccaaggaggtcttcaatactaccacaaactcatagatgcactcctggaaaagaatataacgcctttcgttaccctctatcactgggaccttcctcaaacactccaagatgagtatgaaggtttcttggaccgccagatcatgtatgttccatgcttcttaattatatttgaagagagtcaatattattagtgatagaagaagatttagtctcaattacatgtattactgaaatatttctatactaatatgcacagccaagatttcaaagattacgcggatctatgtttcaaagaatttggtggaaaggtaaagcactggatcacaatcaaccagctatacacagtgcctacgagaggctatgcactcggaacagatgcacccggtcgatgttcttatatggttgataacaagcacaggtgttatggcggaaattcttcaacagaaccctatatcgttgcacataaccagcttcttgctcatgccacgatcgtcgatctttacaggaccaaatataaggtgrgtgatctccctatgtgaaaaggtggtctaaatcaaacatatccgattctaatgaatagtcatatatatatatatatatatcacgtgatgagcagttccaaaaagggaagattggacctgtgatgataactagatggtttcttccatatgatgagtctgatccttcttgcgtagaagcagctgagaggatgaaccaattcttccatggatggtatatataattttttatatagccaaaatatatcagtatgtattttatgcatttataatgatacaaaaatatacatggatgatggatcaggtacatggagccgctaacaaagggtagatacccagacatcatgaggcagattgtgggtagtaggctccccaacttcactgaagctgaagccgaactcgttgctggttcatatgattttcttggtctcaactattacgtcactcagtatgcccagccgaaacctaacccatatccttcagagacacacactgccttgatggacgctggcgtaaagctcacatgtacgtactacagtattaccacttagttacaacctttctatatatctttttctcctatttgttaacatactttgtgagtgactatcaatttatttcattcttgtgtttacagatgataattcacgtggtgaattccttggtccactggtatattaatgatccacccctatgatttctcttttatttttttctattttcaatataacaccacttatgctctctttattgacatgtatatgtgttcgcttccctttcccagttcattgaagacaaagacaacggcaacagctattactacccaaaagggatttattacgtaatggactacttcaaaaccaaatacggtgacccattaatctatgtcaccgagaatggtgagttctacatactactactcatctttttcatctataacgtatactaaataatgtatttcggaataaatcccagaaactgactttcaaatattgtgtacctttgcatgttatggcggttaggatttagcacgcccactacagaaaaccgtggcgaagctattgccgattacaagcgaattgattatctttgcagtcatctatgttttctccgtaaggtcatcaagtga

SEQ ID NO: 705 - DNA, 2431 bp, Brassica juncea
atgaagcttcttcatggactcgctttagtttttctattagctactacgagttgcaaagcagatgaagaaattacttgcgaagagaacaatccattcacctgtagtaacactgatatattaagcagtaagaacttcggaaaaaatttcatcttcggtgttgcatcttctgcttaccaggcatgtagcaaatgttgtcataccccacttttgaaataaattttaaagcactaaaatgcaactttgcatggttgttcttcttatttagatagaaggagggagaggtcgtggtgttaacgtttgggatggcttcagtcaccggtacccaggtatgtggtttgcacggtgacatatatatttatatgcgagaggaatgttggttacatatacacatattaatgtatttgtaactaaaatcagagaaagctgggtcagatttgaagaatggagacactacttgtgagtcatatacgagatggcaggttaatttctcagtacattaatactcatgactgaactatatatgtataaaaactatacgtgtggattgacatgagactaaaattaatatgtaaactgcagaaagatgtagacgtgatgggcgaaatcaatgctactggctacagattctcctttgcatggtcaagaatcattccaagtatgtacatattaacgatcaatgtatatatatctttgtattttaattgggataatttagttggaaaggtactaattaatgtacgatatatatctacccgagcagaaggaaaggtgagtaggggagtgaaccaaggaggtcttcaatactaccacaaactcatagatgcactcctggaaaagaatataacgcctttcgttaccctctatcactgggaccttcctcaaacactccaagatgagtatgaaggtttcttggaccgccagatcatgtatgttccatgcttcttaattatatttgaagagagtcaatattattagtgatagaagaagatttagtctcaattacatgtattactgaaatatttctatactaatatgcacagccaagatttcaaagattacgcggatctatgtttcaaagaatttggtggaaaggtaaagcactggatcacaatcaaccagctatacacagtgcctacgagaggctatgcactcggaacagatgcacccggtcgatgttcttatatggttgataacaagcacaggtgttatggcggaaattcttcaacagaaccctatatcgttgcacataaccagcttcttgctcatgccacgatcgtcgatctttacaggaccaaatataaggtgagtgatctccctatgtgaaaaggtggtctaaatcaaacatatccgattctaatgaatagtcatatatatatatatatatatcacgtgatgagcagttccaaaaagggaagattggacctgtgatgataactagatggtttcttccatatgatgagtctgatccttcttgcgtagaagcagctgagaggatgaaccaattcttccatggatggtatatataattttttatatagccaaaatatatcagtatgtattttatgcatttataatgatacaaaaatatacatggatgatggatcaggtacatggagccgctaacaaagggtagatacccagacatcatgaggcagattgtgggtagtaggctccccaacttcactgaagctgaagccgaactcgttgctggttcatatgattttcttggtctcaactattacgtcactcagtatgcccagccgaaacctaacccatatccttcagagacacacactgccttgatggacgctggcgtaaagctcacatgtacgtactacagtattaccacttagttacaacctttctatatatctttttctcctatttgttaacatactttgtgagtgactatcaatttatttcattcttgtgtttacagatgataattcacgtggtgaattccttggtccactggtatattaatgatccacccctatgatttctcttttatttttttctattttcaatataacaccacttatgctctctttattgacatgtatatgtgttcgcttccctttcccagttcattgaagacaaagacaacggcaacagctattactacccaaaagggatttattacgtaatggactacttcaaaaccaaatacggtgacccattaatctatgtcaccgagaatggtgagttctacatactactactcatctttttcatctataacgtatactaaataatgtatttcggaataaatcccagaaactgactttcaaatattgtgtacctttgcatgttatggcggttaggatttagcacgcccactacagaaaaccgtggcgaagctattgccgattacaagcgaattgattatctttgcagtcatctatgttttctccgtaaggtcatcaagtga

SEQ ID NO: 706 - DNA, 2431 bp, Brassica juncea; identical to SEQ ID NO: 72

SEQ ID NO: 707 - DNA, 2440 bp, Brassica juncea
atgaagcttcttcgtcgactcgctttagtttttctattagctgctgcgagttgcaaggctgatgaagaaattacttgcgaagagaacaatccatttacttgtagtaacactgatattttaagcagcaagaacttcggaaaagatttcatctttggtgttgcgtcttctgcttaccaggcatgtagcaaatgttgtcacaccctaattttgaaataaaattcaaagcaccaatatccaattttgcatagttgtttcttttcatttcagattgaaggagggagaggtcgtggtgttaatgtttgggatggtttcagtcaccggtacccaggtatgtcgttcgcacggtgacatctaaactaataatgttggttacatatacacatattaatgtatttgtaattaatattatcagagaaagctgggtcagatttgaagaatggagacactacttgtgagtcatatacgagatggcaggttaatttctgagtacactgattctcatgactgaattatatatgtataagaactccctaaaaactatacgtgtggattgacatgaaatttaaattaattgtaaactgcagaaagatgtagacgtgatgggcgaaatcaatgctactggctacagattctcctttgcatggtcaagaatcattccaagtatgtacatattaacgatcaatgtatatatatctttgtattttaattgggataatttagttggaaaggtactaattaatgtacgatatatatctacccgagcagaaggaaaggtgagtaggggagtgaaccaaggaggtcttgattattaccaccaactcatagatgcactcctcgaaaagaatataacgcctttcgtaaccctctttcactgggaccttcctcaaacactccaagatgagtatgaaggtttcttggaccgccagatcatgtaggtgccatgcttcttaattatatttgaggagagtaaatattattagtaatagaagaagaagatttagtcttaattacatgtttactgaaatgattctatactaatatgaacagccaggatttcaaagattacgcggatctatgtttcaaagaatttggtggaaaggtaaagcattggatcacgatcaaccagctatacacagttcctacaagaggctatgcagtcggaacagatgcacccggtcgatgttctcctatggttgataccaaacacaggtgttacggcggaaattcttcaacagaaccctacatcgttgcacataaccagcttcttgctcatgccgcggtcgtcgatctttacaggaccaaatataaggtgagtggtgactccatatgtgaaaattagagtggtgtaaatctgatatatatctgattctaatgtatagtcatatatttggaccaacagttccaaaacgggaagattggacctgtgatgataacaagatggtttcttccatatgatgagtctgatcctgcctgcatagaagcagctgagaggatgaaccaattcttccatggatggtatatataattttatatattatcaaaaatgtatcagtatgtattttatgtatttataatgaaacaaaaatatacatggatcaggtacatggagccgctaacgaagggtagatacccagacatcatgaggcaaattgtgggtagtaggcttcccaactttaccgaggaagaagccgcactcgttgccggttcatatgattttcttggtctcaactattatgtcactcagtacgcccggccacaacctaacccatatccttcagagacacacactgccatgatggacgctggagtaaagctcacatgtactaatttacattaccacttagttacaacctttccgtacatatatatatacacatgttctatctcctttttgttacaacatactctgtgagtggccatcaattgtttcatccttgtgtttacagatgataattcacgtggtgaaatacttggtccactggtaatatatgaatgatatccacccctatgatttctcttttatttttatttttctatctgcaatagaacaccactgattatgttctcttgattgatgtgtttgcttccctttctcagttcgctgaagacaaagttaatggcaacagctattactacccaaaaggaatttattacgtaatggactttttcaaaaccaattacagcaaccctttaatctatatcaccgagaacggtgagttctacattctacttactactcatctattctacataaaataattagtgtatttttatatatataagtccaataaactgactttcaatattgtggaatgttttcacggtttaattaggaattagttcgcccagtacagaaagccgttgtgaagctattgccgattacaagcgaattgattatctctgcagtcatctatgttttctccgtaaggtcatcaagtga

SEQ ID NO: 708 - DNA, 2440 bp, Brassica juncea; identical to SEQ ID NO: 707

SEQ ID NO: 709 - DNA, 2440 bp, Brassica juncea; identical to SEQ ID NO: 707

SEQ ID NO: 710 - DNA, 2416 bp, Brassica juncea
atgaagattcttcatggactcgctttagtttttctattagctattgcgagttgcaaagcttatgaagaaattacttgcgaacagaacgaaccattcacatgtggtaacactgatatcttaagcagtaaaaacttcggagaagacttcatcttcggtgttgcatcttctgcgtaccaggcatgcaacaaatgctgccataccatatttttgacgtatagaaaataatattcaaaaatgctaacatcaaactttgcgtggttgtttccatttcagatcgaaggagggagaggtcgtggtgttaacgtttgggatggtttcagtcaccgatacccaggtatgtcacggtggcatatatatacatataagatgaatgtcgtttatatctacacacattaatgtatttgtaattactatcagagaaatcagggtcagatttgctgaatggagacacttcttgtgagtcatatacgagatggaaggttagttcctcagtacatatacactcatatgactaaactacgtataaaatttacgtgtgaactgaattccgtttaaaatgcagaaagatgtagagattatgggagaactcaatgctactggctacagattctccttagcgtggtcaagaatcattccaagtacgaacataaatttgtatttttattgggatcctttagctggaagagtatactaattaatgtatgatataaatgagcagaaggaaaggtgagtaggggagtgaaccaaggaggtcttgattactaccaccaactcatagacgccctcctcgaaaagaatataactcctttcgttaccctctttcactgggaccttcctcaaacactccaagatgagtatgaaggttttttggatcgccagatcatgtatgtgccatgcttcttaattatatacaaattattaataaaaacaagaagaagaagaagaaggttttgtcttaattacatgctttactgaaagaatgattatatattaatatgcacagacaagatttcaaagactatgcggatctatgtttcaaagaatttggtggaaaggtaaagcactggatcacgatcaaccagctattcacagtgcctacgagaggctatgcactcggaacagatgcacccggtagatgttctcctatgattgatgagaggtgttacggcggaaactcttcaacagaaccctatattgttgcacataaccagcttctcgctcatgctgcggtcgtcgatctttacaggaccaactataaggtgagtagtctccatatttaatacgatggtgtgatcttaatccatctgattctgatctagtcatatatatcatgtgaccaacaggaccaacaagggaagattggacctgtgatgataacaagatggtttcttccatatgatgagtctgatcccgcttgcgtagaagcagctgagaggatgaaccaattcttccatggatggtatatcttttttgtttgacatcaaacaattattcttttttttgtttgtttacattaaatggttattttattatttaaaactaaaggtggtctgtataactagaatgattatattgtatgtataatgaaaaaaatatacaccgatcaggcacatggagccgctaacaaagggtagatacccagacatcatgaggcagattgtgggtagtaggcttcccaactttaccgaggaagaagccgcactcgttgccggttcatatgattttcttggtctcaactattatgttactcagtacgcccagccacaacctaacccatatccttcagagacacacactgccatgatggacgctggagtaaagctcacatgtaccactctgtttccactttgttacaacctcctttctatatatatattcctttttgttataaaacatacttaatttgtgagtgaccataagttatttcttccttgtgtttacagataataactcacgtggtgaatatcttggtccactggtaattatgcatgatccatcctcatgatatctctctcattgatatgtatattttgttctgattgatatgtattttttgtttgcttccctttcccagttcgctgaagacaaaatagccggcaacagctattactacccaaaaggaatatattacgtaatggacttcttcaaaaccaattacagcaaccctttaatctatatcaccgagaacggtgagttctacatactacttactactcatctattctacataaattaattagtgtatttttatatattagtcgaggaaactgattttcaaatattgtggaatgttttcacggtttaattaggaataagttcgcccggtacagaaaaccgttgcgaagctattgccgattccaagcgcattgattatctctgcagtcatctatgttttctccgtaaggtcatcaagtaa

SEQ ID NO: 711 - DNA, 2416 bp, Brassica juncea; identical to SEQ ID NO: 710

SEQ ID NO: 712 - DNA, 2416 bp, Brassica juncea; identical to SEQ ID NO: 710

SEQ ID NO: 713 - DNA, 2321 bp, Brassica juncea
atgaagcttcatggactagccttgataggttttctaattgctgcggcgagttgcaaagctattgaggacattaattgccaagagaacgagcctttcacatgtggaaacactgatcagttaagcagtaaaaatttcccaaaagacttcatcttcggtgttgcttctgctgcttaccaggcatgttacaaatcaacaatttttgacgtagaaaaccatttaaaatattaaatccaacgttgcatggttgtttcttattattgtaggtggaagggggcagaggacgtggtcttaacgtttgggatggcttcactcaccgatacccaggtatatcatctacatggtacatatatatataatgtccacatctcttatatatcattcgtagtaatgtatatgtttactatcagagaagggtggatccgatctcgggaatggagacactacttgtgagtcatatacaagatggcaggttaattcctcactgagtcatataggaaaatggcaggttaattccacattcctcactatatataaatgatatccgagtgtgtatgtaaactgcgcagaaagatatagacatcatggacgagctcaatgctactggctacagattctcttttgcgtggtcaagaatcattccaagtatgaacacataaacgatctatttatacaaaaaattctcgtaaattgattgtgagtgttgagaagattaaatatatgatatgtatacatgagcagaaggaaaggtgagtaggggagtgaacaaaggaggtctcgaatactaccacaaactcatagatggtctcgtcgcaaagaatataacaccttttgttaccctctatcactgggacctacctcaaacactgcaagatgagtatgaaggtttcttgaaccgcaccatcatgtatgtcatttgtgccgcgttcttagcaagaaatataagaagaaaaacatatataagtgatctcatgttaatgatttgtttctatgctatgcacagagatgactttagagattatgcggatctatgtttcaaggaatttggtggaaaggtgaagaactggatcacgattaaccagctgtacacagtgcctacgagaggctatgcaatcggaacagatgcacccggtcgatgttctccgaaggttgatgagagatgttacggcggaaattcttcaacagaaccttatatagttgcacataaccagcttcttgctcatgctgcggcggtcgatgtttacaggacaaaatataaggtgagtatatataggtttgtaaataggtgtagtctaacatatatgtcaatgttctaatcatatcatttcatttcgtatgccgtgacaaacagttccaaggagggaagatcggaccagtgatgataactagatggtttcttccatttgatgagactgataaagctagcctatatgcagctgataggatgaaagaattcttcttgggatggtacgtatttgtatgtatatgtacacaaaaatgatatgattatttatacgtatgtacatcgatcaggttcatggagccgctaacaaagggtagatacccagacatcatgagacaaattgtgggtagtcggcttcccaatttcacggaagcagaagcagaactagttgcgggttcatatgattttcttggtctcaactactacaccactcagtatgcccagccaaaacctaacccagttacatgggaaaatcacactgccatgatggacccaggcgcaaagctcacatgtaccactcagtttcctcttatagttacaacctttctatatatatatatatatatataggcttctaagtcttttaaattaagcatatatatactttgtgagtgaccactaattatttcatcattgggtttacagatacgaattcacgtggtgaaaatcttggtccactggtatatgcatgatccacccctgacccctgttacttattattttttttctttctagttgatgtgtatacgtatgcttccttttctcagttcgttaaggacgaaataaacggcgactcctattactacccaaaaggcatttattacgttatggactacttcaaaaccaaataccgtaaccctttgatctatatcactgaaaacggtgactactactcatctctttttccatattaagcaaatatgtatgtttaaaataatgtacaagttgtttatgtaccatgatggttaaattaggatttagtactcccggtgaagaaacccgtgaggaagctattgctgattccaagcggatcgattatctctgcagtcatctatgttttctccgtaaggtcatcaggtga

SEQ ID NO: 714 - DNA, 2321 bp, Brassica juncea; identical to SEQ ID NO: 713

SEQ ID NO: 715 - DNA, 2321 bp, Brassica juncea
atgaagcttcatggactagccttgataggttttctaattgctgcggcgagttgcaaagctattgaggacattaattgccaagagaacgagcctttcacatgtggaaacactgatcagttaagcagtaaaattttcccaaaagacttcattttcggtgttgcttctgctgcttaccaggcatgttacaaatcaacaatttttgacgtagaaaaccatttaaaatattaaatccaacgttgcatggttgtttcttattattgtaggtggaagggggcagaggacgtggtcttaacgtttgggatggcttcactcaccgatacccaggtatatcatctacatggtacatatatatataatgtccacatctcttatatatcattcgtagtaatgtatatgtttactatcagagaagggtggatccgatctcgggaatggagacactacttgtgagtcatatacaagatggcaggttaattcctcactgagtcatataggaaaatggcaggttaattccacattcctcactatatataaatgatatccgagtgtgtatgtaaactgcgcagaaagatatagacatcatggacgagctcaatgctactggctacagattctcttttgcgtggtcaagaatcattccaagtatgaacacataaacgatctatttatacaaaaaattctcgtaaattgattgtgagtgttgagaagattaaatatatgatatgtatacatgagcagaaggaaaggtgagtaggggagtgaacaaaggaggtctcgaatactaccacaaactcatagatggtctcgtcgcaaagaatataacaccttttgttaccctctatcactgggacctacctcaaacactgcaagatgagtatgaaggtttcttgaaccgcaccatcatgtatgtcatttgtgccgcgttcttagcaagaaatataagaagaaaaacatatataagtgatctcatgttaatgatttgtttctatgctatgcacagagatgactttagagattatgcggatctatgtttcaaggaatttggtggaaaggtgaagaactggatcacgattaaccagctgtacacagtgcctacgagaggctatgcaatcggaacagatgcacccggtcgatgttctccgaaggttgatgagagatgttacggcggaaattcttcaacagaaccttatatagttgcacataaccagcttcttgctcatgctgcggcggtcgatgtttacaggacaaaatataaggtgagtatatataggtttgtaaataggtgtagtctaacatatatgtcaatgttctaatcatatcatttcatttcgtatgccgtgacaaacagttccaaggagggaagatcggaccagtgatgataactagatggtttcttccatttgatgagactgataaagctagcctatatgcagctgataggatgaaagaattcttcttgggatggtacgtatttgtatgtatatgtacacaaaaatgatatgattatttatacgtatgtacatcgatcaggttcatggagccgctaacaaagggtagatacccagacatcatgagacaaattgtgggtagtcggcttcccaatttcacggaagcagaagcagaactagttgcgggttcatatgattttcttggtctcaactactacaccactcagtatgcccagccaaaacctaacccagttacatgggaaaatcacactgccatgatggacccaggcgcaaagctcacatgtaccactcagtttcctcttatagttacaacctttctatatatatatatatatatataggcttctaagtcttttaaattaagcrtatatatactttgtgagtgaccactaattatttcatcattgggtttacagatamgaattcacgtggtgaaaatcttggtccactggtatatgcatgatccacccctgacccctgttacttattattttttttctttctagttgatgtgtatacgtatgcttccttttctcagttcgttaaggacgaaataaacggcgactcctattactacccaaaaggcatttattacgttatggactacttcaaaaccaaataccgtaaccctttgatctatatcactgaaaacggtgactactactcatctctttttccatattaagcaaatatgtatgtttaaaataatgtacaagttgtttatgtaccatgatggttaaattaggatttagtactcccggtgaagaaacccgtgaggaagctattgctgattccaagcggatcgattatctctgcagtcatctatgttttctccgtaaggtcatcaggtga

SEQ ID NO: 716 - DNA, 2384 bp, Brassica juncea; identical to SEQ ID NO: 77

SEQ ID NO: 717 - DNA, 2384 bp, Brassica juncea; identical to SEQ ID NO: 77

SEQ ID NO: 718 - DNA, 2384 bp, Brassica juncea; identical to SEQ ID NO: 77

SEQ ID NO: 719 - DNA, 2384 bp, Brassica juncea; identical to SEQ ID NO: 78

SEQ ID NO: 720 - DNA, 2384 bp, Brassica juncea; identical to SEQ ID NO: 78

SEQ ID NO: 721 - DNA, 2384 bp, Brassica juncea; identical to SEQ ID NO: 78

SEQ ID NO: 722 - DNA, 2559 bp, Brassica juncea
atgggttcagacagtactccccaacttccagtgatctatctctcggaccaaaccctaaaaccaggaagtgagaagtgggttgaagtgaggaatgatgtccgtaaagctcttgaagactacggagctttcgaggtgtcatatgatagagtgtcagaggagctaaagcaatcggttttggaagccatgaaagagcttttcgagttaccagttgaggctaaacggaggaacgtgtctccaaaaccctacactggatactcgactcataatggtctttccgagagtttggggatccaggatgccgaggttttggagaaagttaacgaatttactcaactgctacgccctgattttgagggtaacaagagtatcaggtaaggttatgttatgtgaacagcacgatattgctcaatgtgcaagaaatcgctaagcggtaattatgtgatttaaatgagattagtgcataggcamcataccatctagacagatatttttaacaatcaacagagaaaatcgtttcatagtgtatgtctgatactctgatttgtgcataaactgcgtaggccaattttaaaacacaaggattgcttcacaaagtaacttgttcgtaaacccctgttgatttctttatcaaatatattgttcgtaagtttttgttaattgcttctatwtaaaacaagaatatttgtttcttacataatacgttcacgcgttttgtttttgttttgttcttctcttttttattaaaatgtttaaagaaatttctttttgttgaaaacagcgaaacaatccagaagttttcagagaagctagcagaattggatgtaatggtgagaagaatggttatggagagctttgggatagagaagtactttgatgaacacctcaagtcaacgaattaccgtctgcgactgatgaagtatatagcacctcctgatgttgatactaatgttgcagcgggtgctaatgrtgctggtgatggtgctaatgatgctggtgctagtgataatgccaatgttgttgctgatactagtgatattgctagtggtattgctaatgttcatattaatgatgacgccaatattggtgctamggctaatggcgacattggtgctgatgttgatgctaaaactagtgattttgctagtgttgagtctaaagcygacgttagtaccaatgttaatgctaatgctgatgccratgctaatactggtactctcagtagtgctggtgttggtgatagtgttacagctaatggtggtgctgatgatgaggagaagaaattgggtttaccttctcatactgataaaaatcttttcactgtgctttatcaataygagattgaaggtttggaggtgttaaccaaagatgaaaagtggatcagactgaaaccatctcataactctttcgttgttatggctggagattctgtatatgtaagttaacttcttctttctttttatgagatgacatgcacatgtaaaatattaaccgctcctcattatatycatgattttatagcataaatatttcataatttacttttatrttcttttmctttgaatgaaaactaagaayttttacttttatattcwaaaacctaaacccaaacgaatttttttttactgtttcatagtattatttcaaactatgaaaattcagagactatatatatatatatatatatatatatatatatatatatatatatatatatatactgatatgtgatagttacaaaagtaaatccaccttataacttttgatgtttttttattgagtatttgcttcgtaaacgttgatgatctgtgatctctttttcctttttggtaagtatgatttgtgatctcttcaaaagttttaaggtttttgatatggttgtgcatgattacataggctatctaccagaactaaattgagacagaaaacgtgttggaataatagaaagtaacccatcttttaaaattagaagtcgaggaagaaaaaactaaaagaaaaaaaaaactagcggagaaaaaggttcaattcactttccactaaggtgaccaaccaattcctctctctacaaacaaatgtcttatgattctatttgctcttgttcactctcactagtyacgagtgttaggggaccaaccaaatcttatagcaactgatgttttatttgctcttatcacttttcactacaagcgcatgtcttggcttacatcatatgtttkttttcttctgatcatgaccttgctcttracaaaaataaaagtaacagwgatttacttggtgatgtttttgtctttttgtttgcaggcacttatgaatggtagactatttcgtccttttcatcgagtgagagtaacagagaaaaagaagacaagatattcaatagcattgttctcgactccaaacgcaggctacatcatagaaccaccaaaagaacttgtggacgaaaagcatccacgagtcttcaaaccattcacttatgttgacttgatgagtttctatcacactgagggtggtcgtagagctcgttctactcttcatgcttattgcgccgtctctgaagcatga

SEQ ID NO: 723 - DNA, 2549 bp, Brassica juncea
atgggttcagacagtactccccaacttccagtgatctatctctcggaccaaaccctaaaaccaggaagtgagaagtgggttgaagtgaggaatgatgtccgtaaagctcttgaagactacggagctttcgaggtgtcatatgatagagtgtcagaggagctaaagcaatcggttttggaagccatgaaagagcttttcgagttaccagttgaggctaaacggaggaacgtgtctccaaaaccctacactggatactcgactcataatggtctttccgagagtttggggatccaggatgccgaggttttggagaaagttaacgaatttactcaactgctacgccctgattttgagggtaacaagagtatcaggtaagttatgttatgtgaacagcacgatattgctcaatgtgcaagaaatcgctaagcggtaattatgtgatttaaatgagattagtgcataggcaccataccatatagacagatatttttaacaatcaacagagaaaatcgtttcatagtgtatgtctgatttgtgcataaactgcgtaggccaattttaaaacacaaggattgcttcacaaagtaacttgttcgtaaacccctgttgatttctttatcaaatatattgttcgtaagtttttgttaattgcttctatttaaaacaagaatatttgtttcttacataatacgttcacgcgttttgtttttgttttgttcttctcttttttattgaaatgtttaaagaaatttctttttgttgaaaacagcgaaacaatccagaagttttcagagaagctagcagaattggatgtaatggtgagaagaatggttatggagagctttgggatagagaagtactttgatgaacacctcaagtcaacgaattaccgtctgcgactgatgaagtatatagcacctcctgatgttgatactaatgttgcagcgggtgctaatggtgctggtgatggtgctaatgatgctggtgctagtgataatgccaatgttgttgctgatactagtgatattgctagtggtattgctaatgttcatattaatgatgacgccaatattggtgctaaggctaatggcgacattggtgctgatgttgatgctaaaactagtgattttgctagtgttgagtctaaagctgacgttagtaccaatgttaatgctaatgctgatgccgatgctaatactggtactctcagtagtgctggtgttggtgatagtgttacagctaatggtggtgctgatgatgaggagaagaaattgggtttaccttctcatactgataaaaatcttttcactgtgctttatcaatacgagattgaaggtttggaggtgttaaccaaagatgaaaagtggatcagactgaaaccatctcataactctttcgttgttatggctggagattctgtatatgtaagttaacttcttctttctttttatgagatgacatgcacatgtaaaatattaaccgctcctcattatatccatgattttatagcataaatatttcataatttacttttatgttcttttcctttgaatgaaaactaagaatttttacttttatattctaaaacctaaacccaaacgaaattttttttactgtttcatagtattatttcaaactatgaaaattcagagactatatatatatatatatatatatatatatatatatatatatatatatatatatactgatatgtgatagttacaaaagtaaatccaccttataacttttgatgtttttttattgagtatttgcttcgtaaacgttgatgatctgtgatctctttttcctttttggtaagtatgatttgtgatctcttcaaaagttttaaggtttttgatatggttgtgcatgattacataggctatctaccagaactaaattgagacagaaaacgtgttggaataatagaaagtaacccatcttttaaaattagaagtcgaggaagaaaaaactaaaagaaaaaaaaaactagcggagaaaaaggttcaattcactttccactaaggtgaccaaccaattcctctctctacaaacaaatgtcttatgattctatttgctcttgttcactctcactagttacgagtgttaggggaccaaccaaatcttatagcaactgatgttttatttgctcttatcactttcactacaagcgcatgtcttggcttacatcatatgtttgttttcttctgatcatgaccttgctcttaacaaaaataaaagtaacagtgatttacttggtgatgtttttgtctttttgtttgcaggcacttatgaatggtagactatttcgtccttttcatcgagtgagagtaacagagaaaaagaagacaagatattcaatagcattgttctcgactccaaacgcaggctacatcatagaaccaccaaaagaacttgtggacgaaaagcatccacgagtcttcaaaccattcacttatgttgacttgatgagtttctatcacactgagggtggtcgtagagctcgttctactcttcatgcttattgcgccgtctctgaagcatga

SEQ ID NO: 724 - DNA, 2553 bp, Brassica juncea
atgggttcagacagtactccccaacttccagtgatctatctctcggaccaaaccctaaaaccaggaagtgagaagtgggttgaagtgaggaatgatgtccgtaaagctcttgaagactacggagctttcgaggtgtcatatgatagagtgtcagaggagctaaagcaatcggttttggaagccatgaaagagcttttcgagttaccagttgaggctaaacggaggaacgtgtctccaaaaccctacactggatactcgactcataatggtctttccgagagtttggggatccaggatgccgaggttttggagaaagttaacgaatttactcaactgctacgccctgattttgagggtaacaagagtatcaggtaagttatgttatgtgaacagcacgatattgctcaatgtgcaagaaatcgctaagcggtaattatgtgatttaaatgagattagtgcataggcaccataccatctagacagatatttttaacaatcaacagagaaaatcgtttcatagtgtatgtctgatactctgatttgtgcataaactgcgtaggccaattttaaaacacaaggattgcttcacaaagtaacttgttcgtaaaccctgttgatttctttatcaaatatattgttcgtaagtttttgttaattgcttctatttaaaacaagaatatttgtttcttacataatacgttcacgcgttttgtttttgttttgttcttctcttttttattaaaatgtttaaagaaatttctttttgttgaaaacagcgaaacaatccagaagttttcagagaagctagcagaattggatgtaatggtgagaagaatggttatggagagctttgggatagagaagtactttgatgaacacctcaagtcaacgaattaccgtctgcgactgatgaagtatatagcacctcctgatgttgatactaatgttgcagcgggtgctaatggtgctggtgatggtgctaatgatgctggtgctagtgataatgccaatgttgttgctgatactagtgatattgctagtggtattgctaatgttcatattaatgatgacgccaatattggtgctaaggctaatggcgacattggtgctgatgttgatgctaaaactagtgattttgctagtgttgagtctaaagctgacgttagtaccaatgttaatgctaatgctgatgccgatgctaatactggtactctcagtagtgctggtgttggtgatagtgttacagctaatggtggtgctgatgatgagaagaaattgggtttaccttctcatactgataaaaatcttttcactgtgctttatcaatacgagattgaaggtttggaggtgttaaccaaagatgaaaagtggatcagactgaaaccatctcataactctttcgttgttatggctggagattctgtatatgtaagttaacttcttctttctttttatgagatgacatgcacatgtaaaatattaaccgctcctcattatatccatgattttatagcataaatatttcataatttacttttatattcttttcctttgaatgaaaactaagaacttttacttttatattcaaaaacctaaacccaaacgaatttttttttactgtttcatagtattatttcaaactatgaaaattcagagactatatatatatatatatatatatatatatatatatatatatatatatatatatactgatatgtgatagttacaaaagtaaatccaccttataacttttgatgtttttttattgagtatttgcttcgtaaacgttgatgatctgtgatctctttttcctttttggtaagtatgatttgtgatctcttcaaaagttttaaggtttttgatatggttgtgcatgattacataggctatctaccagaactaaattgagacagaaaacgtgttggaataatagaaagtaacccatcttttaaaattagaagtcgaggaagaaaaaactaaaagaaaaaaaaaactagcggagaaaaaggttcaattcactttccactaaggtgaccaaccaattcctctctctacaaacaaatgtcttatgattctatttgctcttgttcactctcactagttacgagtgttaggggaccaaccaaatcttatagcaactgatgttttatttgctcttatcactttcactacaagcgcatgtcttggcttacatcatatgtttgttttcttctgatcatgaccttgctcttaacaaaaataaaagtaacagagatttacttggtgatgtttttgtctttttgtttgcaggcacttatgaatggtagactatttcgtccttttcatcgagtgagagtaacagagaaaaagaagacaagatattcaatagcattgttctcgactccaaacgcaggctacatcatagaaccaccaaaagaacttgtggacgaaaagcatccacgagtcttcaaaccattcacttatgttgacttgatgagtttctatcacactgagggtggtcgtagagctcgttctactcttcatgcttattgcgccgtctctgaagcatga

SEQ ID NO: 725 - DNA, 5605 bp, Brassica juncea
atgggttcagacagtactcctcaacttccagtcatccatctctcggaccaaaccctaaaaccaggaagtgagaagtgggttgaagtgaggagtgatgtccgtaaagctcttgaagactacggcgcgttcgaggtgtcatatgatagagtgtcagaggagcttaaggaatcggttttggaagccatgaaagagcttttccagctacctgttgaggccaaaagaagaaacgtgtctcccaaaccctacactggatatatgactcataatggtatttccgagagtctggggatccaggatgccaatgttttggagaaagttaacgaatttactcaactgctacgccctgattgtgagggtaacaagagtaccaggtccgtattgttatgaacttcatagagtaaaagggaaaattaatctcttagataacaaaaaaaaaaattgtaacaaaaaaacacccaattagaaccttaaactagcactaattaagagataaaataactaaattactccaaaccctaaacccttactctaatcacattttctaaatattaaaccttaaactataatcactaaactctaaactgtaaattctaatcactaaacccaaacacaaatataaaataaaaagaactaaaacttttaattaatgatattttgaaaaaaatttcccttactattttctatcaaaaagattagggctgttcaatatggtaaaaccgaaccgtaccgaaccgaaccgaaccgaaatagacaatatggtttggttttggtatatactatataaaccgaatggatataattttataaaaaycgtaggatttggatatggtttggtatataactgattaaaccgaataaaccgaacaaaaccgattaaaagtagaaacatgtaaatatgtatctattttataacaatacatgaaaatctatttgttacataagttaaatttgtgttaataactattaccataattttatagtaataaaaaaccttaatttgtaaaacacttgaaatataactaaataaccatacatcgcaattcagacatcttattttctaagtttttcttgatatttttgctttattttagtctttactaaattaatatgaagattataaatttgagggacaataattaatggaaaattttcaattgaaaaagcatgactttaatgaacactaaatatagaagagtgaaaaaacttttctttcatgtttctattttgtttcatatttttattttcaaaatttcaaattttgattttagttatagattttattattttatttgatggtagaagcatttttacttttttgttcatttatttgaacatgtaatatatttttaataaaggattgtgttaagaatatgactctaaaattcatataatctagattttgacccgcgcaggcgcgcgggtgtatattttgaaaaatatgtgatatttgtttttcatgtaattattaggattggaaaaatgaatccgaggaacataaccgataccgatccaaagatatagtaccaaacccaaacataaattgattaaatattctaattattcaaaattttgttatttagagaaccgaatctgatccgaaccgaagtatttgggtatccgaatttatctaaaaatagatttatatacttatatatattaatatttttagatttaacgtatataaaacatcaaaaatgatacttttaaattggtttaaatacttgaaaatatatatagatagtcaaaagtaaatatctgaaatagttaaagtatactcaaatcaccaaaaatacttaaaataattattgatttcgtatccaaaattttaaatcaagccaattgatatgttaagcttaagtattatgacatatgttattcaaatttatacgtaatatattattttatttataacatttgagaaatttaaaatatataatgatttaagactttaaaaataatttaaattagttatccaaacccaaaccaaacccgcaaagatccaaatcgaactcaaaccaaaatttagaaacattctaataaggctgaaatctttgaccccgaaaactcaaaatacaaaccgatcagaactaaacccgtatgggtatcaaaagcccatccctagtcattattatatatcgtattttatcatcatataattaatcgtattttatatgtaccatcatataagtaatcatataattaatagtattttatacataccatcatataaataattacatatattatatttttaaaacttaatatgaaatatgaaaaccataatttgagttggtatttcaaattgggctttgtattatatttttcttatatatattgacaatatttttttataatggttattgaaaaatagtttagtaaaaatccatttttgaatatatgtatatttttgaatcaatttttgatataaatcaaatttgaattattattttgatttgaaatatgtatataaagtttaaattttgttttatggttagtttagaaaaaaaaattttagggaattagattgacccattttggtatattttaaaagtggcctagataactttcaattttttaaaaaaacataagcccattacttttttttcttaatactactatccttgttttcaaacaaaaatattttttttaaaagactgcaatccatgtttccaaacactccaaatttttaaaagtcctattcaagtctccaaacactccaattttgtacttgagttttaataagatagatgatctcaaacaaaataattatgttttttggtataaaaccgaataaaccgaaaaccgacggtatataaaccgaaccgaaccgaagtaaatatggatttagaatggtaatcatattttactaaccgaaataccgaaaaccgaaaaaaaccgaaccgaaaccgaaccgatatccggattgaacacccctaaaaaagatgttttagtgatatctttgggtatttctggaaagtaaattgtacgtaaattcttgttagtattatcgaatatattgttcctaggatttcgttaatttcttctagttagagcatgttatatatttttccgctcaaaatagtattatttgtgtagttcagacaagtgacaatttttttttctgtctacatagaaaacttgatttttatatattgttccgtagagaaaatgctagttcactcagatatgaaaccaatgacttaaattttttaatttcatagtatacgttcttgcgtttttgttttgttgttttcttctcttgtatctattcaaattgctcaaagaaatttctgtcttgaaaacagcgaaaggatacataagttttcagagaagatggcagaattggatgtaatggtgagaagaatggtatttgagagctttgggatagaggattactttgatgagaacctcaagtcaatgaattaccgtctacgactgatgaagtattcagcaccacgtgatgttgatacgaatgttgcggcaggtgctaatgatgctggtgatgctgctaatacgaataacaatggtaatactggtgcggatgttggtgctggcgattcagccagtactggtgacaatgacaaggttgttgctagtgatgatgctaatgctggtgctgatactaatgatattgttgttggtattgctaacgttcatattgatgatgatgctaatgatgttgctaaagctaatggcgacgttggtgctggtgttgatgctaatactaatgattgtgctagtgttaagtctagcgccgacgttgataatgttaatgctaatgtcagtgttggtactaatggtgatactaatgctaatgttggcgctgatattgaggagaagaaattaggcttaccttctcatactgataaaaaccttttgacagtactttatcaatatgagattgaaggtttggaggtgttaaccaaagatgaaaagtggatcagagtgaagccatctcataacactttcgttgttatcgctggagattctctacatgtaagttaactcctttttaaatggcatgcatgcataaaatattaactcctcatattaatcaagattttatgacatacttatggaataatttaccctttaatattctaaattaatcaagccaaatcttttttactgtttcgtagtattatttgaaaactattgaaattcagagcctatacatacagatattaattgatatgtacatagttacaaaagtaaatacaccttatcgattttgatgttatttgctttctaaacattgatgattgccgacaaaaaaaaacattgatgatttgtgatctgtccaaaagttttaaggttttgctataattgtgcacgaattgatcatctagccttcaaaaaaaaaacatagattatctaaactaactgaattacagatagagaaattaaagtattatagtaatggaatgtaactaaattagtggaagaaaaaaaagaaaaatattatttaattcacgttcactctttctctacgaactaatattttatgatttcatacttttatgtgctcatgtttactctctcattcacaggggccaggagaccaaccaaacatataacaatattaaaactataaacgtatctctattttttcttataatataattttgtaaatagaaacaaatttttactctaatatatttttctataataaaaaaatattatattttcatactttagaaatactgttttcatctctatatttaaaaataataaatagcatttccttattgtagagaaaatatagcatctatatactaaagatgaacgcatttgagtaaaaattcattgttatttttaaaaaattatattataaatttttttttaaaaacattaacatcaaaattttctcagaatttatcaacattaaaatagccaaaagaataaaaatagaaaaaaagaatgtgggaaagaaagaaaaaatgtaagaaaaaaaactttctttgaaaaaactatgagagacacaaatcacatgtgtcagtatgtaagtattcatatttattctatgtttaaaatttaattatataataaaattatactgctgacaaaaaaagtatactaatattaaaaattgagatatacaccttaaaaattataccaatgatgatcgctctaatgtcttatgatttatttgctcttgtcactttcactttcagtccagttagacaattagtgcatgtctatacaccatgttttgcttactttctatttgacgaagttaattatttcatttttaatgtttattttcttctgatcatgatcttggtgttacacaaaaataagtactaatgatgtacttggcgatgtatatgttttttgattgcaggcacttatgaatggtagactatttctcccgtttcatcgagtaagagtgacggagaaaaagaagacaagatattcaataggattgttctcgactccaaatagagattacatcatagaaccaccaaaggaacttgtggacgagcagcatccacgtgtattcaaaccattaacttacgttgacttaatgagcttctatcacactgaggttggccgtagagctcgatctactctgcatgcctattgtgccgtctccggagcttaa

SEQ ID NO: 726 - DNA, 5605 bp, Brassica juncea; identical to SEQ ID NO: 725

SEQ ID NO: 727 - DNA, 5605 bp, Brassica juncea
atgggttcagacagtactcctcaacttccagtcatccatctctcggaccaaaccctaaaaccaggaagtgagaagtgggttgaagtgaggagtgatgtccgtaaagctcttgaagactacggcgcgttcgaggtgtcatatgatagagtgtcagaggagcttaaggaatcggttttggaagccatgaaagagcttttccagctacctgttgaggccaaaagaagaaacgtgtctcccaaaccctacactggatatatgactcataatggtatttccgagagtctggggatccaggatgccaatgttttggagaaagttaacgaatttactcaactgctacgccctgattgtgagggtaacaagagtaccaggtccgtattgttatgaacttcatagagtaaaagggaaaattaatctcttagataacaaaaaaaaaaattgtaacaaaaaaacacccaattagaaccttaaactagcactaattaagagataaaataactaaattactccaaaccctaaacccttactctaatcacattttctaaatattaaaccttaaactataatcactaaactctaaactgtaaattctaatcactaaacccaaacacaaatataaaataaaaagaactaaaacttttaattaatgatattttgaaaaaaatttcccttactattttctatcaaaaagattagggctgttcaatatggtaaaaccgaaccgtaccgaaccgaaccgaaccgaaatagacaatatggtttggttttggtatataccatataaaccgaatggatataattttataaaaaccgtaggatttggatatggtttggtatataaccgattaaaccgaataaaccgaacaaaaccgattaaaagtagaaacatgtaaatatgtatctattttataacaatacatgaaaatctatttgttacataagttaaatttgtgttaataactattaccataattttatagtaataaaaaaccttaatttgtaaaacacttgaaatataactaaataaccatacatcgcaattcagacatcttattttctaagtttttcttgatatttttgctttattttagtctttactaaattaatatgaagattataaatttgagggacaataattaatggaaaattttcaattgaaaaagcatgactttaatgaacactaaatatagaagagtgaaaaaacttttctttcatgtttctattttgtttcatatttttattttcaaaatttcaaattttgattttagttatagattttattattttatttgatggtagaagcatttttacttttttgttcatttatttgaacatgtaatatatttttaataaaggattgtgttaagaatatgactctaaaattcatataatctagattttgacccgcgcaggcgcgcgggtgtatattttgaaaaatatgtgatatttgtttttcatgtaattattaggattggaaaaatgaatccgaggaacataaccgataccgatccaaagatatagtaccaaacccaaacataaattgattaaatattctaattattcaaaattttgttatttagagaaccgaatctgatccgaaccgaagtatttgggtatccgaatttatctaaaaatagatttatatacttatatatattaatatttttagatttaacgtatataaaacatcaaaaatgatacttttaaattggtttaaatacttgaaaatatatatagatagtcaaaagtaaatatctgaaatagttaaagtatactcaaatcaccaaaaatacttaaaataattattgatttcgtatccaaaattttaaatcaagccaattgatatgttaagcttaagtattatgacatatgttattcaaatttatacgtaatatattattttatttataacatttgagaaatttaaaatatataatgatttaagactttaaaaataatttaaattagttatccaaacccaaaccaaacccgcaaagatccaaatcgaactcaaaccaaaatttagaaacattctaataaggctgaaatctttgaccccgaaaactcaaaatacaaaccgatcagaactaaacccgtatgggtatcaaaagcccatccctagtcattattatatatcgtattttatcatcatataattaatcgtattttatatgtaccatcatataagtaatcatataattaatagtattttatacataccatcatataaataattacatatattatatttttaaaacttaatatgaaatatgaaaaccataatttgagttggtatttcaaattgggctttgtattatatttttcttatatatattgacaatatttttttataatggttattgaaaaatagtttagtaaaaatccatttttgaatatatgtatatttttgaatcaatttttgatataaatcaaatttgaattattattttgatttgaaatatgtatataaagtttaaattttgttttatggttagtttagaaaaaaaaattttagggaattagattgacccattttggtatattttaaaagtggcctagataactttcaattttttaaaaaaacataagcccattacttttttttcttaatactactatccttgttttcaaacaaaaatattttttttaaaagactgcaatccatgtttccaaacactccaaatttttaaaagtcctattcaagtctccaaacactccaattttgtacttgagttttaataagatagatgatctcaaacaaaataattatgttttttggtataaaaccgaataaaccgaaaaccgacggtatataaaccgaaccgaaccgaagtaaatatggatttagaatggtaatcatattttactaaccgaaataccgaaaaccgaaaaaaaccgaaccgaaaccgaaccgatatccggattgaacacccctaaaaaagatgttttagtgatatctttgggtatttctggaaagtaaattgtacgtaaattcttgttagtattatcgaatatattgttcctaggatttcgttaatttcttctagttagagcatgttatatatttttccgctcaaaatagtattatttgtgtagttcagacaagtgacaatttttttttctgtctacatagaaaacttgatttttatatattgttccgtagagaaaatgctagttcactcagatatgaaaccaatgacttaaattttttaatttcatagtatacgttcttgcgtttttgttttgttgttttcttctcttgtatctattcaaattgctcaaagaaatttctgtcttgaaaacagcgaaaggatacataagttttcagagaagatggcagaattggatgtaatggtgagaagaatggtatttgagagctttgggatagaggattactttgatgagaacctcaagtcaatgaattaccgtctacgactgatgaagtattcagcaccacgtgatgttgatacgaatgttgcggcaggtgctaatgatgctggtgatgctgctaatacgaataacaatggtaatactggtgcggatgttggtgctggcgattcagccagtactggtgacaatgacaaggttgttgctagtgatgatgctaatgctggtgctgatactaatgatattgttgttggtattgctaacgttcatattgatgatgatgctaatgatgttgctaaagctaatggcgacgttggtgctggtgttgatgctaatactaatgattgtgctagtgttaagtctagcgccgacgttgataatgttaatgctaatgtcagtgttggtactaatggtgatactaatgctaatgttggcgctgatattgaggagaagaaattaggcttaccttctcatactgataaaaaccttttgacagtactttatcaatatgagattgaaggtttggaggtgttaaccaaagatgaaaagtggatcagagtgaagccatctcataacactttcgttgttatcgctggagattctctacatgtaagttaactcctttttaaatggcatgcatgcataaaatattaactcctcatattaatcaagattttatgacatacttatggaataatttaccctttaatattctaaattaatcaagccaaatcttttttactgtttcgtagtattatttgaaaactattgaaattcagagcctatacatacagatattaattgatatgtacatagttacaaaagtaaatacaccttatcgattttgatgttatttgctttcaaaacattgatgattgccgacaaaaaaaaacattgatgatttgtgatctgtccaaaagttttaaggttttgctataattgtgcacgaattgatcatctagccttcaaaaaaaaaacatagattatctaaactaactgaattacagatagagaaattaaagtattatagtaatggaatgtaactaaattagtggaagaaaaaaaagaaaaatattatttaattcacgttcactctttctctacgaactaatattttatgatttcatacttttatgtgctcatgtttactctctcattcacaggggccaggagaccaaccaaacatataacaatattaaaactataaacgtatctctattttttcttataatataattttgtaaatagaaacaaatttttactctaatatatttttctataataaaaaaatattatattttcatactttagaaatactgttttcatctctatatttaaaaataataaatagcatttccttattgtagagaaaatatagcatctatatactaaagatgaacgcatttgagtaaaaattcattgttatttttaaaaaattatattataaatttttttttaaaaacattaacatcaaaattttctcagaatttatcaacattaaaatagccaaaagaataaaaatagaaaaaaagaatgtgggaaagaaagaaaaaatgtaagaaaaaaaactttctttgaaaaaactatgagagacacaaatcacatgtgtcagtatgtaagtattcatatttattctatgtttaaaatttaattatataataaaattatactgctgacaaaaaaagtatactaatattaaaaattgagatatacaccttaaaaattataccaatgatgatcgctctaatgtcttatgatttatttgctcttgtcactttcactttcagtccagttagacaattagtgcatgtctatacaccatgttttgcttactttctatttgacgaagttaattatttcatttttaatgtttattttcttctgatcatgatcttggtgttacacaaaaataagtactaatgatgtacttggcgatgtatatgttttttgattgcaggcacttatgaatggtagactatttctcccgtttcatcgagtaagagtgacggagaaaaagaagacaagatattcaataggattgttctcgactccaaatagagattacatcatagaaccaccaaaggaacttgtggacgagcagcatccacgtgtattcaaaccattaacttacgttgacttaatgagcttctatcacactgaggttggccgtagagctcgatctactctgcatgcctattgtgccgtctccggagcttaa

SEQ ID NO: 728 - DNA, 1781 bp, Brassica juncea; identical to SEQ ID NO: 120

SEQ ID NO: 729 - DNA, 1781 bp, Brassica juncea; identical to SEQ ID NO: 120

SEQ ID NO: 730 - DNA, 1781 bp, Brassica juncea
atgggtgcagacactcctcaacttccagtcatctatctctcggaccaaaccctaaaaccaggaagtgagaagtgggttgaagtgaggagtgatgtccgtaaagctcttgaagactacggcggttttgaggtgtcatatgatagagtgtcagaggagctgaagaagtcagttttggatgccatgatagagcttttcgagttaccagttgaggctaaacagagaaacgtgtctccgaaaccgtacactggatattcaactcataatggtctctctgagagtctagggatccagaattccaatgttttggagaaagttaacgaatttactcaactgctacgccctgattgtgagggtaacaagagtatgaggtaacgtcatgtcaaaaaaaaaaaactaagtaatgcttcgtagagtatattgttcgtaaactcctgttattttttaatcaaaaatattttcgtaatttttttgttagttgcttttataagctatgtaacaattttctatataaaaccttgtttttatttttattttttttggaaaaatgtcagttcacttatatagtaatgaactgaaaatttgttttcaatctcacgtttctcgcattttattttcttgtttctattaaaatagctatataattttctttgtgttgaaaacagcgaaacgatccagaatttttcagagaagttagcagaattggatgtaatggtgagaagaatggtcatagagagctttgggatagaaaactactttgatgaacacctcaagtcaacgaattaccgtttgcgactgatgaaatatgtagcaccacctgatgttgatgctaatgttgcggttggtactaaagattctgatgatggtgctaatacgaatacaactgctaacgctgatgctgatgatattgctaatggtattgctaaagttcatattgatgacgatgctgatgccaagggtgacgtttgcactggtgctggtaccaatcataatggtgatgacgttaatactggtgattgtgctaatgttaagtctaatgtcgacgttggtactaatgttagtgctaaatctagtgttggtgctgatgttaacactggcactattgatgatgttaatgctaatgctggtactcgtagtagtgctaatgttggcgttagtgatagtgttaaagctaatggtggcgcagatgatgaggagaagaaattaggtctaccttctcatactgataaaaaccttttgacggtactttatcaatatgagattgaaggtttggaggtgttaaccaaagatgaaaagtggatcaggttaaaaccatctcataactctttcgttgttatggctggagattctctatatgtaagttctaacttattttatttttaaatgggatgcacctttttattttttcctatcactttcacaaatgcatgtcttttctttactaaagtgtttatacattaacattatatgttttcttctcatcatgaaacttgttttgatttttgtattatttttgtttgcaggcacttatgaatggtagactgtctcgtccgtttcatagagtaagagtaacggaaagaaagaagacaaggtattcaatagcattgttctcgactccaaacggagattacatcatcgaaccaccaaaagagcttgtggacgagaagcacccacgtctcttcaaaccattcacttacgttgacttgatgagtttctatcacactgaggctggtcgtagagctcgttctactcttcacgcttattgtgccgtctctggagcataa

SEQ ID NO: 731 - DNA, 4059 bp, Brassica juncea
atgggttcagacagtactcctcaacttccagtgatctatctctcggaccaaaccctaaaaccaggaagtgagaagtgggttgaagtgaggagtgatgtccgtaaagctcttgaagactacggcgctttcgaggtgtcatatgatagagtgtcagaggagcttaaggaatcggttttggaagccatgaaagagcttttcgacttaccagttgaggctaagcagagaaacgtgtctccaaaaccctacactggatattctactcataatggtctctccgagagtctagggatccaggatgctgaggttttggagaaagttaacgagtttactcaactgctacgtcctgattgtgagggtaacaagagtatcaggtaaggttatgttatgtgaaaagaacaatattgcttatgatgtgcaggaaatcgttaagcggtaattaagcgatgtaaatggaactagttcctaggcgtcatatagaccaatatttttaacaatcgatatagaaaatcattcgtagtctatggctgattttccgtatagactacctagaccgagttttacaacacaactagattttgacccgcaaatccttgtggatattttctcattttataaatgtatagttttgatatatcctaagttttctagttttttttgtcatcaaaatgttgtaaatatatgatttatattttaatattatatattttgtaactctataatcttattggttaagttttttattcgacattattcatatataatgatttgctttatacattttacatttgttatataattttattatttttcaatcgttcataaataaattcataatttgaaataatcaaatagagaatctccttcaattttatatattgcatgcataatatcattttaaaattttatttagttatactatagaaatgatatattgtttaggataatttatattatcatattgtgtttaaaaaatatactttaacatatattattttagtatttactgcagatttataagtaaatacattgtttaatttaaagtaattaacacgtattattttaataaattttatacatagagccatctatcatacttatcttgtaattttattcgtatatgatatattttggatgtttatgatattaattttttgattaattaaattaagacttcaaaatattagattactttaatttttataacatagtttgttttttcgtgttacatttcaaaaagttattctttattatctatgattataccttcagaaaaatttaaaacattatcattttaagtttgcatacttattttttaaattttatattttgtcaaattgtttggaaaattacacaactatatttgaggtgggagattatatgatttttgaaatttgtttgttgctaaattaatacattatttttatataaataatattaatttggtaagattattttcttaaatattttttataatttaatgtaaaattaaaatttctatttaaatttgatttttcgttaaattttagaatgaattattaaaatttcatagttttctaataacatatttttaaatagttatgactaaagttattatttattatattgataaacattataaaaatatattgttgggagtttcaaaataaataaaaggatatatatgttgagatataaaattttaacactatgttaataaatttatttttgtataaaatattattagttagatgttaaccattttaatgataatgataatttattaaatgaaataatttaataaaaacttaattactatgaatataattgtcatatttaattcactatctcaattcatttttatataatacataatataatatagaatactataaaataatcgtataaatttatattttcttttgttttatgaataaaattttattaacattagatttgtaactaatattttattactaattacgaaattaattaatatgttattttataaaaatatttaaatttagtaagattttgttacattctttttcaagatattttaaaattcaattttatagttggtttattattaatgtaaataatcaaatatgtcacattacctaatttataaatggtcctactatgatttgtttatgatagataaaatataggaccctaaattaatagattagattattgcttcacaatgtaacctgttcgtaaatcttgttgatttctttaccaaatatattgttcgtaagtttttgctaattgcttctatttaaagcaataatttttgtttcttatagtatgttctcacgttttgtttttgtcttttttctcttttttaaaagtgtttaaagcaatttctttgtgttgaaaacagcgaaacaatccagaagttttcagagaagttagcagaattggatgtaatggtgagaagaatggttatggagagctttgggatagagaagtactttgatgaacacctcaagtcaacaaattaccgtctgcgactgatgaagtatatagcaccacctgaagttgatactaatgttgcggtgggtgctaatgatgctggtgatggtgctaatgatgcaagtgctagtgataaggccaatgttgttgctggggatgaagataatgttggtgctgatactagtgatattgctaatggtatagctaatgttcatattgatgatgacgctaaggctaatggcgacattggtgctgatgttgatgctaaaactagtgattgtgctaatgttgagtctaaagccgatgttagtaccgatgttaatgccaattctgattccaatgctaatactggtactcttagtagtgctagtgttggtgatattgttaaagctaatggtggtgctgatgatgaggagaagaaattaggtttaccttctcatactgataaaaatcttttcacggtgctttatcaatatgagattgaaggtttggaggtgttaaccaaagatgaaaagtggataagattgaaaccatctcataactctttcgttgttatggctggagattccgcatatgtaagttaacttcttctcctttttttaagacgacatgcagacgtaaaatattaacattcaccattgcattcatgattctatgtcccataatttacttttatattatttttaatgaaaaataagaatttttacttttatattataaaaaaaatcaaactaaattgtttttactgtttcattgtattatttgaaactattaaaattcagagcctatatatatatatatatatatatatataacatttgatgtaattttctttctacacgttgatgatttgagatctctccaaaagttttaatgtttgatatggttatgcatgattacatagtctatctactagaactaaattgagacagagaaagtgttggaataatagaaagtaatccatcttttaaaattagaagtcgaggaagaaaaaacttttttaaaaaactagtggagaaaagaaaaagatgatttcaattcacttttactaaggtgaccaaccaaatttgctctcgacaaactaatttcttatgattctaattcctcttgttcactctcactagtcactagggttagggaccaaccaaatcttatagcaactaatgtttttttttgctcttatcgctttcgctagcaagcgtatatgtcttggcaatacaccatgtgtttcttttctcctgatcatgacctttctcttaacaaaggataaagtaacaattttaccaaaaaaaaggataaagtaacgatgatgtacctggtgattttttgtcattttgtttgcaggcacttatgaatggtagactttttcgtccgtttcatcgagtaagagtaacggagaaaaagaagacaagatattcaatagcattattctcaactccaaacgcaggtaacatcatagaaccaccaaaagaacttgtggacgagaagcatccacgagtcttcaaaccattcacttatgttgacttgatgagtttctatcacactgaggctggtcgtagagctcgatctactcttcatgcttattgtgccgtctccgaagcatga

SEQ ID NO: 732 - DNA, 4057 bp, Brassica juncea
atgggttcagacagtactcctcaacttccagtgatctatctctcggaccaaaccctaaaaccaggaagtgagaagtgggttgaagtgaggagtgatgtccgtaaagctcttgaagactacggcgctttcgaggtgtcatatgatagagtgtcagaggagcttaaggaatcggttttggaagccatgaaagagcttttcgacttaccagttgaggctaagcagagaaacgtgtctccaaaaccctacactggatattctactcataatggtctctccgagagtctagggatccaggatgctgaggttttggagaaagttaacgagtttactcaactgctacgtcctgattgtgagggtaacaagagtatcaggtaaggttatgttatgtgaaaagaacaatattgcttatgatgtgcaggaaatcgttaagcggtaattaagcgatgtaaatggaactagttcctaggcgtcatatagaccaatatttttaacaatcgatatagaaaatcattcgtagtctatggctgattttccgtatagactacctagaccgagttttacaacacaactagattttgacccgcaaatccttgtggatattttcattttataaatgtataattttgatatatcctaagttttctagttttttttgtcatcaaaatgttgtaaatatatgatttatattttaatattatatattttgtaactctataatcttattggttaagttttttattcgacattattcatatataatgatttgctttatacattttacatttgttatataattttattatttttcaatcgttcataaataaattcataatttgaaataatcaaatagagaatctccttcaattttatatattgcatgcataatatcattttaaaattttatttagttatactatagaaatgatatattgtttaggataatttatattatcatattgtgtttaaaaaatatactttaacatatattattttagtatttactgcagatttataagtaaatacattgtttaatttaaagtaattaacacgtattattttaataaattttatacatagagccatctatcatacttatcttgtaattttattcgtatatgatatattttggatgtttatgatattaattttttgattaattaaattaagacttcaaaatattagattactttaatttttataacatagtttgttttttcgtgttacatttcaaaaagttattctttattatctatgattataccttcagaaaaatttaaaacattatcattttaagtttgcatacttattttttaaattttatattttgtcaaattgtttggaaaattacacaactatatttgaggtgggagattatatgatttttgaaatttgtttgttgctaaattaatacattatttttatataaataatattaatttggtaagattattttcttaaatattttttataatttaatgtaaaattaaaatttctatttaaatttgatttttcgttaaattttagaatgaattattaaaatttcatagttttctaataacatatttttaaatagttatgactaaagttattatttattatattgataaacattataaaaatatattgttgggagtttcaaaataaataaaaggatatatatgttgagatataaaattttaacactatgttaataaatttatttttgtataaaatattattagttagatgttaaccattttaatgataatgataatttattaaatgaaataatttaataaaaacttaattactatgaatataattgtcatatttaattcactatctcaattcatttttatataatacataatataatatagaatactataaaataatcgtataaatttatattttcttttgttttatgaataaaattttattaacattagatttgtaactaatattttattactaattacgaaattaattaatatgttattttataaaaatatttaaatttagtaggattttgttagattctttttcaagatattttaaaattcaattttatagttggtttattattaatgtaaataatcaaatatgtcacattacctaatttataaatggtcctactatgatttgtttatgatagataaaatataggaccctaaattaatagattagattattgcttcacaatgtaacctgttcgtaaatcttgttgatttctttaccaaatatattgttcgtaagtttttgctaattgcttctatttaaagcaataatttttgtttcttatagtatgttctcacgttttgtttttgtcttttttctcttttttaaaagtgtttaaagcaatttctttgtgttgaaaacagcgaaacaatccagaagttttcagagaagttagcagaattggatgtaatggtgagaagaatggttatggagagctttgggatagagaagtactttgatgaacacctcaagtcaacaaattaccgtctgcgactgatgaagtatatagcaccacctgaagttgatactaatgttgcggtgggtgctaatgatgctggtgatggtgctaatgatgcaagtgctagtgataaggccaatgttgttgctggggatgaagataatgttggtgctgatactagtgatattgctaatggtatagctaatgttcatattgatgatgacgctaaggctaatggcgacattggtgctgatgttgatgctaaaactagtgattgtgctaatgttgagtctaaagccgatgttagtaccgatgttaatgccaattctgattccaatgctaatactggtactcttagtagtgctagtgttggtgatattgttaaagctaatggtggtgctgatgatgaggagaagaaattaggtttaccttctcatactgataaaaatcttttcacggtgctttatcaatatgagattgaaggtttggaggtgttaaccaaagatgaaaagtggataagattgaaaccatctcataactctttcgttgttatggctggagattccgcatatgtaagttaacttcttctcctttttttaagacgacatgcagacgtaaaatattaacattcaccattgcattcatgattctatgtcccataatttacttttatattatttttaatgaaaaataagaatttttacttttatattataaaaaaaatcaaactaaattgtttttactgtttcattgtattatttgaaactattaaaattcagagcctatatatatatatatatatatatatataacttttgatgtaattttctttctacacgttgatgatttgagatctctccaaaagttttaatgtttgatatggttatgcatgattacatagtctatctactagaactaaattgagacagagaaagtgttggaataatagaaagtaatccatcttttaaaattagaagtcgaggaagaaaaaacttttttaaaaaactagtggagaaaagaaaaagatgatttcaattcacttttactaaggtgaccaaccaaatttgctctcgacaaactaatttcttatgattctaattcctcttgttcactctcactagtcactagggttagggaccaaccaaatcttatagcaactaatgtttttttttgctcttatcgctttcgctagcaagcgtatatgtcttggcaatacaccatgtgtttcttttctcctgatcatgacctttctcttaacaaaggataaagtaacaattttaccaaaaaaaaggataaagtaacgatgatgtacctggtgattttttgtcattttgtttgcaggcacttatgaatggtagactttttcgtccgtttcatcgagtaagagtaacggagaaaaagaagacaagatattcaatagcattattctcaactccaaacgcaggtaacatcatagaaccaccaaaagaacttgtggacgagaagcatccacgagtcttcaaaccattcacttatgttgacttgatgagtttctatcacactgaggctggtcgtagagctcgatctactcttcatgcttattgtgccgtctccgaagcatga

SEQ ID NO: 733 - DNA, 4049 bp, Brassica juncea
atgggttcagacagtactcctcaacttccagtgatctatctctcggaccaaaccctaaaaccaggaagtgagaagtgggttgaagtgaggagtgatgtccgtaaagctcttgaagactacggcgctttcgaggtgtcatatgatagagtgtcagaggagcttaaggaatcggttttggaagccatgaaagagcttttcgacttaccagttgaggctaagcagagaaacgtgtctccaaaaccctacactggatattctactcataatggtctctccgagagtctagggatccaggatgctgaggttttggagaaagttaacgagtttactcaactgctacgtcctgattgtgagggtaacaagagtatcaggtaaggttatgttatgtgaaaagaacaatattgcttatgatgtgcaggaaatcgttaagcggtaattaagcgatgtaaatggaactagttcctaggcgtcatatagaccaatatttttaacaatcgatatagaaaatcattcgtagtctatggctgattttccgtatagactacctagaccgagttttacaacacaactagattttgacccgcaaatccttgtggatattttcattttataaatgtataattttgatatatcctaagttttctagttttttttgtcatcaaaatgttgtaaatatatgatttatattttaatattatatattttgtaactctataatcttattggttaagttttttattcgacattattcatatataatgatttgctttatacattttacatttgttatataattttattatttttcaatcgttcataaataaattcataatttgaaataatcaaatagagaatctccttcaattttatatattgcatgcataatatcattttaaaattttatttagttatactatagaaatgatatattgtttaggataatttatattatcatattgtgtttaaaaaatatactttaacatatattattttagtatttactgcagatttataagtaaatacattgtttaatttaaagtaattaacacgtattattttaataaattttatacatagagccatctatcatacttatcttgtaattttattcgtatatgatatattttggatgtttatgatattaattttttgattaattaaattaagacttcaaaatattagattactttaatttttataacatagtttgttttttcgtgttacatttcaaaaagttattctttattatctatgattataccttcagaaaaatttaaaacattatcattttaagtttgcatacttattttttaaattttatattttgtcaaattgtttggaaaattacacaactatatttgaggtgggagattatatgatttttgaaatttgtttgttgctaaattaatacattatttttatataaataatattaatttggtaagattattttcttaaatattttttataatttaatgtaaaattaaaatttctatttaaatttgatttttcgttaaattttagaatgaattattaaaatttcatagttttctaataacatatttttaaatagttatgactaaagttattatttattatattgataaacattataaaaatatattgttgggagtttcaaaataaataaaaggatatatatgttgagatataaaattttaacactatgttaataaatttatttttgtataaaatattattagttagatgttaaccattttaatgataatgataatttattaaatgaaataatttaataaaaacttaattactatgaatataattgtcatatttaattcactatctcaattcatttttatataatacataatataatatagaatactataaaataatcgtataaatttatattttcttttgttttatgaataaaattttattaacattagatttgtaactaatattttattactaattacgaaattaattaatatgttattttataaaaatatttaaatttagtaagattttgttacattctttttcaagatattttaaaattcaattttatagttggtttattattaatgtaaataatcaaatatgtcacattacctaatttataaatggtcctactatgatttgtttatgatagataaaatataggaccctaaattaatagattagattattgcttcacaatgtaacctgttcgtaaatcttgttgatttctttaccaaatatattgttcgtaagtttttgctaattgcttctatttaaagcaataatttttgtttcttatagtatgttctcacgttttgtttttgtcttttttctcttttttaaaagtgtttaaagcaatttctttgtgttgaaaacagcgaaacaatccagaagttttcagagaagttagcagaattggatgtaatggtgagaagaatggttatggagagctttgggatagagaagtactttgatgaacacctcaagtcaacaaattaccgtctgcgactgatgaagtatatagcaccacctgaagttgatactaatgttgcggtgggtgctaatgatgctggtgatggtgctaatgatgcaagtgctagtgataaggccaatgttgttgctggggatgaagataatgttggtgctgatactagtgatattgctaatggtatagctaatgttcatattgatgatgacgctaaggctaatggcgacattggtgctgatgttgatgctaaaactagtgattgtgctaatgttgagtctaaagccgatgttagtaccgatgttaatgccaattctgattccaatgctaatactggtactcttagtagtgctagtgttggtgatattgttaaagctaatggtggtgctgatgatgaggagaagaaattaggtttaccttctcatactgataaaaatcttttcacggtgctttatcaatatgagattgaaggtttggaggtgttaaccaaagatgaaaagtggataagattgaaaccatctcataactctttcgttgttatggctggagattccgcatatgtaagttaacttcttctcctttttttaagacgacatgcagacgtaaaatattaacattcaccattgcattcatgattctatgtcccataatttacttttatattatttttaatgaaaaataagaatttttacttttatattataaaaaaaatcaaactaaattgtttttactgtttcattgtattatttgaaactattaaaattcagagcctatatatatatatatatataacatttgatgtaattttctttctacacgttgatgatttgagatctctccaaaagttttaatgtttgatatggttatgcatgattacatagtctatctactagaactaaattgagacagagaaagtgttggaataatagaaagtaatccatcttttaaaattagaagtcgaggaagaaaaaacttttttaaaaaactagtggagaaaagaaaaagatgatttcaattcacttttactaaggtgaccaaccaaatttgctctcgacaaactaatttcttatgattctaattcctcttgttcactctcactagtcactagggttagggaccaaccaaatcttatagcaactaatgtttttttttgctcttatcgctttcgctagcaagcgtatatgtcttggcaatacaccatgtgtttcttttctcctgatcatgacctttctcttaacaaaggataaagtaacaattttaccaaaaaaaaggataaagtaacgatgatgtacctggtgattttttgtcattttgtttgcaggcacttatgaatggtagactttttcgtccgtttcatcgagtaagagtaacggagaaaaagaagacaagatattcaatagcattattctcaactccaaacgcaggtaacatcatagaaccaccaaaagaacttgtggacgagaagcatccacgagtcttcaaaccattcacttatgttgacttgatgagtttctatcacactgaggctggtcgtagagctcgatctactcttcatgcttattgtgccgtctccgaagcatga

SEQ ID NO: 734 - DNA, 1808 bp, Brassica juncea
atgggtgcagacactcctcaacttccagtcatctatctctcggaccaaaccctgaaaccaggaagtgagaagtgggctgaagtcaggagtggtgtccgtaaagctctcgaagaatatggtgctttcgaggtgtcatatgatagagtgacagaggagcttaagaagtcagttttggatgccatgatagagcttttcgagttaccagttgaggctaaacagagaaacgtgtctccgaaaccctacatgggatattcgactcataatggtctctctgagagtctagggatccaggatcccaatgttttggagaaagttaacgaatttactcaactgctacgccctgattgtgagggtaacaagagtatgaggtaactgtcatgtcaagaaaaactcaataatgctccgtataataaattgttcgtaaactattgttaattttagtcaaatgtattttygtaatttttttagttgcttttataagttatgcgacaattttctatatgaaaccttgttttatttatttttttgtgtggaaaacatgtcaggttcactcatatagcaatgaactgatattttgtttcaatcacacgtttctcgcattttattttcttgtttctataaaatagctatactaattttctttctattgaaaacagcgaaacaatccagaagttttcagagaagttagtagaattggatgtaactgtgaaaagaatggtcatacagagctttgggatagagaactactttgatgaacacctcaagtcattgaagaattaccgtatgcgactgatgaagtacgtagcaccacctgatgttgatgctaaagatgctgatgatggtgccaatacgaatctgaatgctaacgctgatgcggatgctggtgctggtgatattgctaatggtattgctaatgttcatattgatgaagatgttaatgccaagggtgacgttkgcactggtggtggtgatgctaatcataatggtgatgatgctaatactggtgattctgctagtgtaaagtcgaatgttgacgttggtactgatgttaatgttaaagctagtgttggtgctgatgttaacgttggcactattgctgatgctaatgctaatattggtactcttagtagtgctaatgttggcgttggggatagtgttaaagctaatggtggcgctgatgatgaggagaagaaattaggtttaccttctcatactgataaaaacctcttgacggtactttatcaatatgagattgatggtttggaggtgttgaccaaagatgaaaagtggatcaggttgaaaccagctcacaactctttcgttgttatagctggagattctctatatgtaagttttaacttattttttatttttaaatgacatgcaccgtaatatattaattgcgatcctataataatcaagactttttatttgctcttataactaattcacaagtgcatgtttttactaaagcgttatatacatcattttatgttttcttctgatcataaatcttgtgttgatgtttttattatttttgtgtgcaggcacttatgaatggtagactatctcgcccgtttcatagagtaagggtaacagaaagaaagaagacaaggtattcaatagcattgttctcggctccagacggagattacatcatcgaaccaccaaaagagcttgtggacgagaagcacccacgtctcttcaaaccattcacatatgctgacttgatgagtttctatcacactgaagctggtcgtagatctcgttctactcttgacgcttattctgctgtctctggagcataa

SEQ ID NO: 735 - DNA, 1808 bp, Brassica juncea
atgggtgcagacactcctcaacttccagtcatctatctctcggaccaaaccctaaaaccaggaagtgagaagtgggctgaagtcaggagtggtgtccgtaaagctctcgaagaatatggtgctttcgaggtgtcatatgatagagtgacagaggagcttaagaagtcagttttggatgccatgatagagcttttcgagttaccagttgaggctaaacagagaaacgtgtctccgaaaccctacatgggatattcgactcataatggtctctctgagagtctagggatccaggatcccaatgttttggagaaagttaacgaatttactcaactgctacgccctgattgtgagggtaacaagagtatgaggtaactgtcatgtcaagaaaaactcaataatgctccgtataataaattgttcgtaaactattgttaattttagtcaaatgtatttttgtaatttttttagttgcttttataagttatgcgacaattttctatatgaaaccttgttttatttatttttttttgtggaaaacatgtcaggttcactcatatagcaatgaactgatattttgtttcaatcacacgtttctcgcattttattttcttgtttctataaaatagctatactaattttctttctattgaaaacagcgaaacaatccagaagttttcagagaagttagtagaattggatgtaactgtgaaaagaatggtcatacagagctttgggatagagaactactttgatgaacacctcaagtcattgaagaattaccgtatgcgactgatgaagtacgtagcaccacctgatgttgatgctaaagatgctgatgatggtgccaatacgaatctgaatgctaacgctgatgcggatgctggtgctggtgatattgctaatggtattgctaatgttcatattgatgaagatgttaatgccaagggtgacgttggcactggtggtggtgatgctaatcataatggtgatgatgctaatactggtgattctgctagtgtaaagtcgaatgttgacgttggtactgatgttaatgttaaagctagtgttggtgctgatgttaacgttggcactattgctgatgctaatgctaatattggtactcttagtagtgctaatgttggcgttggggatagtgttaaagctaatggtggcgctgatgatgaggagaagaaattaggtttaccttctcatactgataaaaacctcttgacggtactttatcaatatgagattgatggtttggaggtgttgaccaaagatgaaaagtggatcaggttgaaaccagctcacaactctttcgttgttatagctggagattctctatatgtaagttttaacttattttttattttgaaatgacatgcaccgtaatatattaattgcgatcctataataatcaagactttttatttgctcttataactaattcacaagtgcatgtttttactaaagcgttatatacatcattttatgttttcttctgatcataaatcttgtgttgatgtttttattatttttgtgtgcaggcacttatgaatggtagactatctcgcccgtttcatagagtaagggtaacagaaagaaagaagacaaggtattcaatagcattgttctcggctccagacggagattacatcatcgaaccaccaaaagagcttgtggacgagaagcacccacgtctcttcaaaccattcacatatgctgacttgatgagtttctatcacactgaagctggtcgtagatctcgttctactcttgacgcttattctgctgtctctggagcataa

SEQ ID NO: 736 - DNA, 1805 bp, Brassica juncea
atgggtgcagacactcctcaacttccagtcatctatctctcggaccaaaccctgaaaccaggaagtgagaagtgggctgaagtcaggagtggtgtccgtaaagctctcgaagaatatggtgctttcgaggtgtcatatgatagagtgacagaggagcttaagaagtcagttttggatgccatgatagagcttttcgagttaccagttgaggctaaacagagaaacgtgtctccgaaaccctacatgggatattcgactcataatggtctctctgagagtctagggatccaggatcccaatgttttggagaaagttaacgaatttactcaactgctacgccctgattgtgagggtaacaagagtatgaggtaactgtcatgtcaagaaaaactcaataatgctccgtataataaattgttcgtaaactattaattttagtcaaatgtattttcgtaatttttttagttgcttttataagttatgcgacaattttctatatgaaaccttgttttatttatttttttgtgtggaaaacatgtcaggttcactcatatagcaatgaactgatattttgtttcaatcacacgtttctcgcattttattttcttgtttctataaaatagctatactaattttctttctattgaaaacagcgaaacaatccagaagttttcagagaagttagtagaattggatgtaactgtgaaaagaatggtcatacagagctttgggatagagaactactttgatgaacacctcaagtcattgaagaattaccgtatgcgactgatgaagtacgtagcaccacctgatgttgatgctaaagatgctgatgatggtgccaatacgaatctgaatgctaacgctgatgcggatgctggtgctggtgatattgctaatggtattgctaatgttcatattgatgaagatgttaatgccaagggtgacgtttgcactggtggtggtgatgctaatcataatggtgatgatgctaatactggtgattctgctagtgtaaagtcgaatgttgacgttggtactgatgttaatgttaaagctagtgttggtgctgatgttaacgttggcactattgctgatgctaatgctaatattggtactcttagtagtgctaatgttggcgttggggatagtgttaaagctaatggtggcgctgatgatgaggagaagaaattaggtttaccttctcatactgataaaaacctcttgacggtactttatcaatatgagattgatggtttggaggtgttgaccaaagatgaaaagtggatcaggttgaaaccagctcacaactctttcgttgttatagctggagattctctatatgtaagttttaacttattttttatttttaaatgacatgcaccgtaatatattaattgcgatcctataataatcaagactttttatttgctcttataactaattcacaagtgcatgtttttactaaagcgttatatacatcattttatgttttcttctgatcataaatcttgtgttgatgtttttattatttttgtgtgcaggcacttatgaatggtagactatctcgcccgtttcatagagtaagggtaacagaaagaaagaagacaaggtattcaatagcattgttctcggctccagacggagattacatcatcgaaccaccaaaagagcttgtggacgagaagcacccacgtctcttcaaaccattcacatatgctgacttgatgagtttctatcacactgaagctggtcgtagatctcgttctactcttgacgcttattctgctgtctctggagcataa

SEQ ID NO: 737 - DNA, 2115 bp, Brassica juncea
atggcatcaatcagtttgcttggccgaatactatcaagacccacaaaaaccaaagaccggtctcgtcagcttcctcctggaccaccaggatggcccatcctcggcaatttgcccgaactaatgatgactcgtcctaggcacaaatatatcgacatcgccttgaaagggcaaaaaccggagatcgcatgtttcaacttcgccggaacacacgccatcgtcataaactctgacgagatcgctcgagaagcgcttaaagagcgagacgccgacttcgcagaccggccaaatcttttcaacatgagaaccatcggaggcaatcacaaatcaatggggaactcaccctacggtgaacagttcatgaagatgaaaagagtgatcactacggagattatgtccgttaaaacattaaacatgttagtagctgcgagaactgttgaagcggacaacctccttgcttaccttctctccatgtacaaacggtctgagactgctgacgttagagagttctcgagggtttatggttacgctgtgaccatgagattgttgtttggaaggagacatatcacgaaagaaaatgttttctccgacgagggaaggttaggacaagcggagaaagatcatcttgatgcgattttcgaaaccttaaactgtttgccgagtttctctccggcggattacttggaaaaatggtttagaggttggaacattgatggtcaagaggagagggtggtaatgtactgtaataaagttcgcagttacaacaatccgatcattgacgagagggtggagctatggagggaaaaaggtgggaaagcagctgttgaagattggattgatactttcattacgctaaaagatgaaaatggaaagtattatatcacgccggatgaggtcaaagctcaatgcgttgtaagtaaacactatactattttactactataattgattatataacattagacaattacaagatattaatacaaaatactatgatcatcgaagtaatacattacagtatatatatacactactgatactattgaaaatggcattagggatagttttacatgatttttgtttcaaaagaaatatatctactaaaaataatattaatttttttttattgtatggagaatcaacttttattaattgttttaggatcccactaaaatctattgtttgatgttttgtttctgcaggagttttgtatagcagcgatcgataatccggcaaataacatggaatggacacttgcggaaatgttaaaaaacccggagattctcaaaaaagctttgaaggagttagacgaagtggtgggaagagacaggcttgttcaggaatctgacataccaaatctaaactacttaaaagcttgttgcagagaaacattcaggattcaccctagtgctcattatgtccctacacatgtggctcgtcaagataccaccctcgggggttatttcattcccaaaggtaaaaagttgtatattatcttaggaattacgtttttacaatagttaaggttatgcgtggttagattataaaatattccaccaaccgtatatataaggaatattgttgatatttttacaggtaaatccatgacatttttttttttaattatgatgcatctgaatattccacacatacacataagaaaaagataaaatcaaacatgtaaccagttgagccaccaataatttgatatgatacatatattaagaaagtatatattggttttggacaggtagccacattcatgtagggcgtccaggaataggccggagctccaaagtatggaaagatccattggtatacaaaccagagcgtcacctcgaaggagatggaatctcgaaggagctttctctggtcgaaagtgaattgcgtttcgtgtcgtttggtaccggtcggcgtggctgcgtcggtgtcaaagtcgggacgatcatgatggttataatgttggctaggtttcttcaagcgtttaactggaaactccatcctggttacggaccgttaagtctagaggaagatgatgcattgcttatggctaaacctcttctcttgtccgttgagccacgcttggcacccaacctttatccaaaattctgcccttga

SEQ ID NO: 738 - DNA, 2115 bp, Brassica juncea
atggcatcaatcagtttgcttggccgaatactatcaagacccacaaaaaccaaagaccggtctcgtcagcttcctcctggaccaccaggatggcccatcctcggcaatttgcccgaactaatgatgactcgtcctaggcacaaatatatcgacatcgccttgaaagggcaaaaaccggagatcgcatgtttcaacttcgccggaacacacgccatcgtcataaactctgacgagatcgctcgagaagcgcttaaagagcgagacgccgacttcgcagaccggccaaatcttttcaacatgagaaccatcggaggcaatcacaaatcaatggggaactcaccctacggtgaacagttcatgaagatgaaaagagtgatcactacggagattatgtccgttaaaacattaaacatgttagtagctgcgagaactgttgaagcggacaacctccttgcttaccttctctccatgtacaaacggtctgagactgctgacgttagagagttctcgagggtttatggttacgctgtgaccatgagattgttgtttggaaggagacatatcacgaaagaaaatgttttctccgacgagggaaggttaggacaagcggagaaagatcatcttgatgcgattttcgaaaccttaaactgtttgccgagtttctctccggcggattacttggaaaaatggtttagaggttggaacattgatggtcaagaggagagggtggtaatgtactgtaataaagttcgcagttacaacaatccgatcattgacgagagggtggagctatggagggaaaaaggtgggaaagcagctgttgaagattggattgatactttcattacgctaaaagatgaaaatggaaagtattatatcacgccggatgaggtcaaagctmaatgcgttgtaagtaaacactatactattttactactataattgattatataacattagacaattacaagatattaatacaaaatactatgatcatcgaagtaatacattacagtatatatatacactactgatactattgaaaatggcattagggatagttttacatgatttttgtttcaaaagaaatatatctactaaaaataatattaatttttttttattgtatggagaatcaacttttattaattgttttaggatcccactaaaatctattgtttgatgttttgtttctgcaggagttttgtatagcagcgatcgataatccggcaaataacatggaatggacacttgcggaaatgttaaaaaacccggagattctcaaaaaagctttgaaggagttagacgaagtggtgggaagagacaggcttgttcaggaatctgacataccaaatctaaactacttaaaagcttgttgcagagaaacattcaggattcaccctagtgctcattatgtccctacacatgtggctcgtcaagataccaccctcgggggttatttcattcccaaaggtaaaaagttgtatattatcttaggaattacgtttttacaatagttaaggttatgcgtggttagattataaaatattccaccaaccgtatatataaggaatattgttgatatttttacaggtaaatccatgacatttttttttttaattatgatgcatctgaatattccacacatacacataagaaaaagataaaatcaaacatgtaaccagttgagccaccaataatttgatatgatacatatattaagaaagtatatattggttttggacaggtagccacattcatgtagggcgtccaggaataggccggagctccaaagtatggaaagatccattggtatacaaaccagagcgtcacctcgaaggagatggaatctcgaaggagctttctctggtcgaaagtgaattgcgtttcgtgtcgtttggtaccggtcggcgtggctgcgtcggtgtcaaagtcgggacgatcatgatggttataatgttggctaggtttcttcaagcgtttaactggaaactccatcctggttacggaccgttaagtctagaggaagatgatgcattgcttatggctaaacctcttctcttgtccgttgagccacgcttggcacccaacctttatccaaaattctgcccttga

SEQ ID NO: 739 - DNA, 2115 bp, Brassica juncea; identical to SEQ ID NO: 737

SEQ ID NO: 740 - DNA, 2163 bp, Brassica juncea
atgacaatgatgatgatgagccttaccacatcgttaccgtacccttttcaaatcctactagtctttatcttgtccatagcatccatcactttgcttggccgaatactatcaagacccacaaaaaccaaagaccggtctcgtcagcttcctcctggaccaccaggatggcccatcctcggcaatttacccgaactaatgaagactcgtcctaggcacaaatatttcgaaattgccacgaaagggcaaaaaccggagatcgcgtgtttcaacttcgccggaacacacaccatcatcataaactcggatgagatcgctcgagaagcgtttaaagagcgagacgccgacttcgcagaccggccaaatactttcaacatgagaaccatcggaggcaatcacaaatcaatggggaacacacccaccggtgaacagttcatgaaaatgaaaagagtgatcacatcggagattatgtccgtgaaaacattaaacatgttggtagcttccagaaacattgaagcggacaacctccttgcttaccttctctcgatttataaacggtccgagacagccgacgttagagagatctcgaggaattatggttacgctgtgacaatgagaatgatgtttggaaggagacatgtcacgaaagaaaatgttttctccgacgagggaaggttaggaccagcggagaaagatcatcttgatgcgatcttcgaaacgttaaactgtttgccgagtttctctccggctgattacttggaaaaatggtttctcggctggaacgttgatggtctagaggagagggtgacagtgaactgtaataaagtccgcagttacaacaatccgatcattgacgagagggtggagttatggagagaaaaaggtggtaaggcagctgttgaagattggattgatacgttcattaccctaaaagatgaaaacggaaagtattatatcacgccggatgaagtcaaaggtcaatgcgttgtaagtgaacactagtagtattttactactataattgattatatatcataagacagttacaagatattattacaaaatattatgatcatcgacagtatagatatactactgatattattgaaaatggcattgcggatagttttacatgttttttgtttcaaaagaaatatatcaacaaaaaattaatatttagattttttttgttatatgaagaatcaacttttattaattgttttaggaccccgttaaatatattgtttggtgttttatttcaggaattttgcatagcagcgatcgataatccggcaaataacatggaatggacacttgcggaaatgttaaagaacccggagattctcaaaaaagctttgaaggagttagacgaagtggtgggaagagacaggcttgttcaggaatctgacataccaaacctaaactacttaaaagcttgttgcagagaaacattcagggttcacccaagtgctcattatgtccctactcatgtggctcgtcgagatagcaccctcggaggttatttcattcccaaaggtaaaacaacaaaaattgtgtagtaactcaagactttacatttttacaatagcaaagcttatgcatagttagattgtaacaatatttgcgacgattaaaattctaccaaacgtattcaaaatttggatcatgcatctaaccatatacaaagtaatcttgttgattttgtttagattcatgactggtttttgatgatgcgtgcaaatactccaccagtagttttgtatgatgcgtgtattaaaaaagtatttgttttggacaggtagccacattcacgtcgcccgtcctggaataggccggagctccaaagtatggaaagatccattggtatacaaaccggagcgtcacctcgaaggaaatggaatctcgaaggagctttctctggtcgaaaatgaaatgcgtttggtgtcgtttggtaccggtcggcgtggctgcatcggtgtgaaagtcgggacgatcatgatggttataatgttggctaggtttcttcaagcgtttaactggaaactccatcctagttatggaccgttaagtctagaggaagatgatgcattgcttatggctaagcctcttctcttgtccgttgagccacgcttggcacccaacctttacccaaaattctacccttga

SEQ ID NO: 741 - DNA, 2163 bp, Brassica juncea; identical to SEQ ID NO: 113

SEQ ID NO: 742 - DNA, 2163 bp, Brassica juncea; identical to SEQ ID NO: 740

SEQ ID NO: 743 - protein, 551 aa, Raphanus raphanistrum
MKHLWLALTFLLALAICKADEEISCEENVPFTCGQTHRFNSSSFEKDFIFGLASSAYQACNISTISNIEGSINRGLNVWDGFTHRFPHKAGPDNGNGDTTCDSYSYWEKDIEVMDELKATGYRFSIAWSRIIPRGKRSRGVHRGGINYYHGLIDGLIEKGITPLVTLFHWDLPQVLQDDYEGFLDPQIIEDFRDYADLCFEEFGDKVKNWFTINQLYSVPTRGYGLGADAPGRCSPKVDSTCYAGNSSTEPYIVAHNQLLAHAKVVDLYRTKYKHQGGKIGPVMITRWFLPYNDTDPDCIVATERMKEFFLGWFMGPLTNGTYPQIMIDTVGERLPSFTPEESKLVKGSYDFLGLNYYFSQYVQPSPNHVDRDDHTAMMDAGARLTFRNASNHLIGPVFADHRDDETRNIYYYPKGIYYVMDHFKTKYNDPLIYITENGFVTSDETREEAKFDYRRIDYLCSHLCFLSKVIKETGVKVKGYCAWSLGDNYEFGQGFTVRFGLTYIDWNNVTDRDLKESGKWYKKFLATKNPAKKDFLRSSLTFEKKKLADA

SEQ ID NO: 744 - protein, 366 aa, Raphanus raphanistrum
MKHLGLILAFLLAVATCKADEEITCQENLPFKCSQTGRLNSSSFEKDFIFGVASSAYQAYKSGPDHGNGDTTCDSFSYWQKDIDVLDELNATGYRFSIAWSRIIPRGKRSRGVNKEGINYYHGLIDGLIDKGITPFVTLFHWDLPQVLQDEYEGFLDRRIIDDFKEYADLCFREFGHKVKNWITINQLYTVPTRGYALGSDAPGRCSPAVDPTCYAGNSSSEPYIVAHNQLLAHATVVDLYRKNYSQQGGKIGPVMITRWFLPYNDTDPGSIAATERMKEFFFGWFMGPLTNGTYPQIMIDTVGVLLPSFSPEESNLVKGSYDFLGLNYYVTQYAQPSPNHVHWANHTALMDAGATLTCTTQYISA

SEQ ID NO: 745 - protein, 526 aa, Raphanus raphanistrum
MKHVGLILAFLLAVATCKADEEISCEENLPFTCGHTDRLNSSNFEKDFIFGVASSAYQAYKGGPDHGNGDTTCDSYSYWKNDIKVMNELKATGYRFSIAWSRIIPGGKRSRGVNQEGINYYHGLINGLVDKGITPFVTLFHWDLPQALQDDYEGFLDSQIIDDFKDYADLCFQEFGHKVNNWITINQLYTVPTRGYALGTDAPGRCSPMVDPTCYAGNSSTEPYIVAHNQLLAHATVVDLYRKNYSHQGGKIGPVMITRWFLPYNDTDPDSIAATERMKEFFLGWYMGPLTNGTYPQSMIDTVGERLPSFTPEESNLVKGSYDFLGLNYYVTQYAQPSPNHVDWDNHTALMDAGAMLTYRNASNHVIGPLFAVDKHDETKNSYYYPKGIYYVMDYFKTKYYNPLIYVTENGISTPGDETLVVAMSDSTRIDYICSHLCFLSKVIKETGVNVKGYFAWSLGDNYEFCQGFTVRFGLSYVDWKNVTDRNLKDSGKWYKKFIATKNPGKQDFLFSSLTFEKKKKKLADA

SEQ ID NO: 746 - protein, 542 aa, Raphanus raphanistrum
MKHIGLILVFLLAVATCKADEETTCKESVSECGHTDKFNSGSFEKDFIFGVASSAYQACSVGRGLNIWDSFTHRYPSKSGSDHGNGDTTCDSYSYWEKDIEALVELKATGYRFSIAWSRILPKGKKSRGVNKEGIKYYQGLIKELINRGITPFVTLFHWDLPQTLQDEYGGFLSRRIIQDFRDYADVCFKEFGADVKNWITINQLYTVPTRGYGFGSDAPGRCSIALDPTCETGNSSSEPYMVAHHQLLAHATVVHHYRKHYSDQGGKIGPVMITRWFLPYNPSDQDSIDATEKMKQFFLGWFMGPLTNGAYPKIMIDTVGQRLPSFTPDESKLVKDSYDFLGLNYYVTQYVQSSPNHVDWDNHTAMMDAGTTLTYVDVNGDPIGPLFTEDKVDKNKSTYYYPEGIYDVMKFFKTNYSDPLIYVTENGFSTPGDQTRKEAKLDCKRIDYLCSHLYYLSKVIKDTGVNVKGYFAWSLGDNYEFCKGFTVRFGLSYVDWNNVNDRDLKQSGKWYKKFITTKDPPKKDFLRSSLTFEKKKKFADA

SEQ ID NO: 747 - protein, 503 aa, Raphanus raphanistrum
MQRCMVVSFHFRSKEGEVVVLTFGMVSVTDTQLLSEKSGSDLKNGDTTCESYTRWQKDVDVMGEINATGYRFSFAWSRIIPKGKVSRGVNQGGLEYYHKLIDALLEKNITPFVTLFHWDLPQTLQDEYEGFLDRQIIQDFKDYADLCFKEFGGKVKHWITINQLYTVPTRGYAIGTDAPGRCSPMVDTKHRCYGGNSSTEPYIVAHNQLLAHAAAVDLYRTKYKFQKGKIGPVMITRWFLPYDDSDPASIEAAERMNQFFHGWYMEPLTKGRYPDIMRQIVGSRLPNFTEEEAALVAGSYDFLGLNYYVAQYTQPKPNPYPSETHTAMMDAGVKLTYENSRGELIGPLFVEDKDNGNSYYYPKGIYYVMDYFKTKYGDPLIYVTENGFSTPGSEKREQAIADYKRIDYLCSHLCFLRKVIKEKGVNVRGYFAWALGDNYEFCKGFTVRFGLSYVNWDDLDDRNLKESGQWYQRFINGTVKNPAKQDFLRSSLSSQSQKRLADA

SEQ ID NO: 748 - protein, 559 aa, Raphanus raphanistrum
MKIHSLRPISQPKLFSSVDSDGFLPDKALELNDEAGYRVMVPEEARELERQLGQVSKEKNEAVRGQDFEKIEGGRGRGVNVWDGFTHRYPEKAGSDLKNGDTTCESYTRWQKDVDVMGELNATGYRFSFAWSRIIPKGKVSRGVNQGGLEYYHKLIDALLEKNITPFVTLYHWDLPQTLQDEYEGFLDRQIIQDFKDYADLCFKEFGGKVKHWITINQLYTVPTRGYAIGTDAPGRCSPMVDSKHRCYGGNSSTEPYIVAHNQLLAHATIVDLYRTKYKFQKGKIGPVMITRWFLPYDESDPASIEAAERMNQFFHGWYMEPLTKGRYPDIMRQIVGSRLPNFTEEEAELVAGSYDFLGLNYYVTQYAQPKPNPYPSVTHTAMMDAGVKLTYDNSRGEFVGPLFVEDKDNGNSYYYPKGIYYVMDYFKTKYGDPLIYVTENGFSSPGSENRVQAIADYKRIDYLCSHLCFLRKVIKEKGVNVRGYFAWSLGDNYEFCKGFTVRFGLSYVNWDDIDDRNLKESGKWYQRFINGTAKNHAKQDFLRSSLSSQSQKKRLADA

SEQ ID NO: 749 - protein, 522 aa, Raphanus raphanistrum
MKLLGLALVLLLAAASCKAGEEITCEENEPFTLKALEKTSSSVLHLLLTRHIEGGRGRGVNIWDGFSHRYPEKSGSDLKNGDTTCESYTRWQKDVDVMGEINATGYRFSFAWSRIIPKGKVSRGVNQGGLEYYHKLIDALLEKNITPFVTLFHWDLPQTLQDEYEGFLDRQIIQDFKDYADLCFKEFGGKVKHWITINQLYTVPTRGYAIGTDAPGRCSPMVDTKHRCYGGNSSTEPYIVAHNQLLAHAAAVDLYRTKYKFQKGKIGPVMITRWFLPYDDSDPASIEATERMNQFFHGWYMEPLTKGRYPDIMRQIVGSRLPNFTEEEAALVAGSYDFLGLNYYVAQYTQPKPNPYPSETHTAMMDAGVKLTYNGNSYYYPKGIYYVMDYFKTKYGNPLIYVTENGFSTPSSEKREQAIADYKRIDYLCSHLCFLRKVIKEKGVNVRGYFAWALGDNYEFCKGFTVRFGLSYVNWDDLDDRNLKESGQWYQRFINGTVKNPAKQDFLRSSLSSQSQKRLADA

SEQ ID NO: 750 - protein, 539 aa, Raphanus raphanistrum
MKLLGLALVLLLAAASCKAGEEITCEENEPFTLKALEKTSSSVLHLLLTRHIEGGRGRGVNIWDGFSHRYPEKSGSDLKNGDTTCESYTRWQKDVDVMGEINATGYRFSFAWSRIIPKGKVSRGVNQGGLEYYHKLIDALLEKNITPFVTLFHWDLPQTLQDEYEGFLDRQIIQDFKDYADLCFKEFGGKVKHWITINQLYTVPTRGYAIGTDAPGRCSPMVDTKHRCYGGNSSTEPYIVAHNQLLAHAAAVDLYRTKYKFQKGKIGPVMITRWFLPYDDSDPASIEATERMNQFFHGWYMEPLTKGRYPDIMRQIVGSRLPNFTEEEAALVAGSYDFLGLNYYVAQYTQPKPNPYPSETHTAMMDAGVKLTYENSRGELIGPLFVEDKDNGNSYYYPKGIYYVMDYFKTKYGNPLIYVTENGFSTPSSEKREQAIADYKRIDYLCSHLCFLRKVIKEKGVNRILRFAWALGDNYEFCKGFTVRFGLSYVNWDDLDDRNLKESGQWYQRFINGTVKNPAKQDFLRSSLSSQSQKRLADA

SEQ ID NO: 751 - protein, 539 aa, Raphanus raphanistrum; identical to SEQ ID NO: 750

SEQ ID NO: 752 - protein, 542 aa, Brassica napus
MKHIWLTLAFLLALATCKADEEINCEENLPFTCGQTDRFNSTSFEKDFIFGLASSAYQACSINRGVNVWDGFTHRFPHKAGPDHGNGDTTCNSYSYWEKDIEVMDELKATGYRFSIAWSRVIPRGKRSRGVHQGGINYYHGLINGLIDKGITPLVTLFHWDLPQVLQDDYEGFLDPQIIDDFRDFADLCFEEYGDKVKHWFTINQLYSVPTRGYGLGSDAPGRCSPKVDSTCYAGNSSTEPYIVAHNQLLAHATVVDLYRTKYKHQGGKIGPVMITRWFLPYNDTDPDSIAATERMKEFFLGWYMGPLTNGTYPQIMIDTVGERLPSFTPEESKLVKGSYDFLGLNYYFTQYVQPSPNHVDSDGHTAMMDAGTRLTYRNASNHAIGPVFTEHKDDETKNTYYYPKGIYYVMDHFKTNYNNPVIYITENGFSTSGDETREEAKFDYRRIDYLCSHLCFLSKVIKETGVKVKGYCAWSLGDNYEFGQGFTVRFGLTYIDWNNVTDRDLKESGKWYKKFIATKNLAKPNFLRSSLTFEKKKFADA

SEQ ID NO: 753 - protein, 526 aa, Brassica napus
MKHLWLTLAFLLALATCKADEEITCEENLPFTCGQTDRFNSSSFEKDFIFGSINRGVNVWDGFTHRFPHKAGPDHGNGDTTCNSYSYWEKDIEVMDELKATGYRFSIAWSRIIPRGKRSRGVHQGGINYYHGLINGLIEKGITPLVTLFHWDLPQVLQDDYEGFLDPQIIDDFRDFADLCFEEYGDKVKHWFTINQLYSVPTRGYGLGSDAPGRCSPKVDSTCYAGNSSTEPYIVAHNQLLAHATVHQGGKIGPVMITRWFLPYNDTDPDSIAATERMKEFFLGWYMYMGPLTNGTYPQIMIDTVGERLPSFTPEESKLVKGSYDFLGLNYYFTQYVQPSPNHVDSDGHTAMMDAGTRLTYRNASNHAIGPVFTEHKDDETKNTYYYPKGIYYVMDHFKTNYNDPVIYITENGFSTSGDETREEAKFDYRRIDYLCSHLCFLSKVIKETGVKVKGYCAWSLGDNYEFGLGFTVRFGLTYIDWNNVTDRDLKESGKWYKKFIATKNLAKPNFLRSSLTFEKKKFADA

SEQ ID NO: 754 - protein, 546 aa, Brassica napus
MKHLGLILAFLLALATCKADEEITCEENLPFKCSQPDRLNSSSFEKDFIFGVASSAYQACCLGRGLNVWDGFTHRYPNKSGPDHGNGDTTCDSFSYWQKDIDVLDELNATGYRFSIAWSRIIPRGKRSRGVNKDGINYYHGLIDGLIDKGITPFVTLFHWDLPQVLQDEYEGFLDPQIIHDFKDYANLCFQEFGHKVKNWLTINQLYTVPTRGYGAGSDAPGRCSPMVDPTCYAGNSSTEPYIVAHNQLLAHATVVDLYRKNYSHQGGKIGPVMITRWFLPYNDTDPDSIAATERMKEFFLGWYMFMGPLTNGTYPQIMIDTVGDRLPSFSPEESNLVKGSYDFLGLNYYVTQYAQPSPNPVHWANHTAMMDAGAKLTYINASNHYIGPLFEANSDETENSYYYPKGIYYVMDYFKTKYYNPLIYVTENGISTPGNETRDESMFDYKRIEYLCSHLCFLSKVIKEKHVNVKGYFAWSLGDNYEFDKGFTVRFGLSYIDWNNVTDRDLKLSGKWYQKFISPAIKNPLKKDFLRSSLTFEKNKKFADA

SEQ ID NO: 755 - protein, 528 aa, Brassica napus
MKHLGLILAFLLALATCKADEEITCEENLPFKCSQPDRLNSSSFEKDFIFGVASSAYQACCLGRGLNVWDGFTHRYPNKSGPDHGNGDTTCDSFSYWQKDIDVLDELNATGYRFSIAWSRIIPRGKRSRGVNKDGINYYHGLIDGLIDKGITPFVTLFHWDLPQVLQDEYEGFLDPQIIHDFKDYANLCFQEFGHKVKNWLTINQLYTVPTRGYGAGSDAPEPYIVAHNQLLAHATVVDLYRKNYSHQGGKIGPVMITRWFLPYNDTDPDSIAATERMKEFFLGWYMFMGPLTNGTYPQIMIDTVGERLPSFSPEESNLVKGSYDYLGLNYYVTQYAQPSPNPVHWANHTAMMDAGAKLTYINASNHSIGPLFEANSDETKNSYYYPKGIYYVMDYFKTKYYNPLIYVTENGISTPGNETRDESMFDYKRIEYLCSHLCFLSKVIKEKHVNVKGYFAWSLGDNYEFDKGFTVRFGLSYIDWNNVTDRDLKLSGKWYQKFISPAIKNPLKKDFLRSSLTFEKNKKFEDA

SEQ ID NO: 756 - protein, 492 aa, Brassica napus
MKHIGLILVFLLAVATCKADEESTCKETLSACGHTDQFNSGSFEKDFIFGVASSAYQACGVGRGLNVWDGFTHRYPNKSGSDHGNGDTTCDSYSYWELNYSMYTYESYNMTKDIEALVELNATGYRFSIAWSRIVPRGKRSRGDLPQALQDEYEGFLDPQIINDFKDYADLCFYEFGDNVTNWITINQLYTVPTRGYGFGSDAPGRCSRALDPTCYAGNSSTEPYIVAHHQLLAHAMVVDLYRKNYTHQGGSCMGPLTNGTYPQIMIDTVRNRLPSFTPEESKLVKGSYDFIGLNYYVTQYVQPSPNHLDWANHTAMMDAGATLTYRNISGHPIGPLFTEDKGDDTKNTYYYPEGISYVMEYFKTKYYNPLIYVTENGFSTPGDQTREDAKLDCKRIDYLSSHLSFLSKVIKEKHVNVKGYFAWSLGDNYEFCKGFTVRFGLSYIDWNNVTDRDLKQSGKWYKKFITTKDLPKKDFLRSSLTFEKKKKFADA

SEQ ID NO: 757 - protein, 531 aa, Brassica napus
MKFRGLDLIVFLLAVVSCKANKEITCEENEPFTCNNTDRLNSKGFPKDFIFGVSSAAYQACGRGRGLNIWDGFTHRYPEKGGSDLGNGDTTCESYTMWQKDIDIMDEMNATGYRFSFAWSRIIPKGKVSRGVNKGGLEYYHRLIDGLIAKNITPFVTLYHWDLPQTLQDEYDGFLNRQVIEDFRDFADLCFKEFGGKVKNWLTINQLYSVPTRGYSTGADAPGRCSPKVDARCYGGNSSTEPYIVAHNQLLAHAAVVNLYRTKYRASTCPFFQRGRIGPVMITRWFLPFDETNKASIDAAERMKEFFLGWYMEPLTRGRYPDIMRRMVGNRLPNFTEAEARLVAGSYDFLGLNYYATQYVQPTPNPLPVTSERYTAMMDPGTRLTFVNSRGEKTGPLFEELKGGNSYYYPKGIYYVMDYFKTKYRNPLIYITENGFSTSGDQTRQEAVADSKRIDYLCSHLCFLRKVIMEKRVNIKGYFAWALGDNYEFGKGFTVRFGLSYVNWTDVSDRNLKDSGKWYQRFINMKTLADA

SEQ ID NO: 758 - protein, 381 aa, Brassica napus
MKLRGLVLIVFLLAVVSCKANGEITCEENEPFTCNNTARLNSKGFPKDFIFGIEGGRGRGLNVWDGFTHRYPEKGGPDLGNGDTTCESYTMWQKDIDILDEMNATGYRFSFAWSRIIPAEGKVSRGVNKGGLKYYHKLIDGLIAKNITPFVTLYHWDIPQTLQDEYQGFLNRQVIDDFRDYADLCFKEFGGKVKNWLTLNQLYTVPTRGYSTGADAPEPYIVAHNQLLAHAAVVNLYRTKYRASTWIIGPVMITRWFLPFNETDRASIDATERMKEFFFGWYMEPLTRGRYPDIMRRMVGSRLPNFTEAEARLVAGSYDFLGLNYYVGQYVQPAPNPLPVTSERYTAMMDPGTRLTSVNARGEKIGPLVCMHDLPTRIYCF

SEQ ID NO: 759 - protein, 538 aa, Brassica napus
MKLRGLVLIVFLLAVVSCKANGEITCEENEPFTCNNTARLNSKGFPKDFIFGVASSAYQACGRGRGLNVWDGFTHRYPEKGGPDLGNGDTTCESYTKWQKDIDILDEMNATGYRFSFAWSRIIPAEGKVSRGVNKGGLKYYHKLIDGLIAKNITPFVTLYHWDIPQTLQDEYQGFLNRQVIDDFRDYADLCFKEFGGKVKNWLTLNQLYTVPTRGYSTGSDAPGRCSPKVDERCYGGNSSTEPYIVAHNQLLAHAAVFQRGIIGPVMITRWFLPFNETDRASIDATERMKEFFFGWYMEPLTRGRYPDIMRRMVGSRLPNFTEAEARLVAGSYDFLGLNYYVGQYVQPAPNPLPVTSERYTAMMDPGTTLTSVNARGEKIGPLFEDFQGSRIYYYPKGIYYVMDHFRTRYRNPLIYVTENGFTTPASENRPEAVADSKRIDYLCSHLCFLRKVIREKRVNIKGYFAWSLGDNYEFAKGFAVRFGLTYVNWTDVSDRNLKDSGRWYQRFINVTSKNTANEDFLRSSLSFKNKMKTLADA

SEQ ID NO: 760 - protein, 553 aa, Brassica napus
MKLHGLALIGFLIAVVSCKAIEECRENEPFTCGNTDQLSSKSFPKDFIFGVASAAYQACYKSTIFDVEGGRGRGLNVWDGFTHRYPEKGGSDLGNGDTTCESYTRWQKDIDIIDELNATGYRFSFAWSRIIPKGKVSRGVNKGGLEYYHKLIDGLIAKNITPFVTLFHWDLPQTLQDEYEGFLNRTVIDDFRDYADLCFKEFGGKVKNWITINQLYTVPTRGYAIGTDAPGRCSPEVDEKCYGGNSSTEPYIVAHNQLLAHAAAVDVYRTKYKFQKGKIGPVMITRWFLPFDKTDQASRDAANRMKEFFLGWFMEPLTKGRYPDIMREIVGSRLPNFTEAEAELVAGSYDFLGLNYYTTQYAQPKPNPVTWANHTAMMDPGAKLTYNNSRGENLGPLFVKDEKNGNAYYYPKGIYYVMDYFKTKYSNPLIYITENGFSTPGEENRDKAIADSKRIDYLCSHLCFLRKVIREKGVNIKGYFAWALGDNYEFCKGFTVRFGLSYVNWTDLNDRNLKKSGKWYQSFINGTTKNPAKQDFRRPNLSLRNQKKNLADA

SEQ ID NO: 761 - protein, 535 aa, Brassica napus
MKLHGLALIGFLIAVVSCKAIEECRENEPFTCGNTDQLSSKSFPKDFIFGVASAAYQACYKSTIFDVEGGRGRGLNVWDGFTHRYPEKGGSDHGNGDTTCESYTRWQKDIDIIDELNATGYRFSFAWSRIIPKGKVSRGVNKGGIEYYHKLLDGLIAKNITPFVTLYHWDLPQTLQDEYEGFLNRTVIDDFRDYADLCFKEFGGKVKNWITINQLYTVPTRGYAIGTDAPGRCSPAVDERCYGGNSSTEPYIVAHNQLLAHAAAVDVYRRKYKFQKGKIGPVMITRWFLPFDETDASRDAAERMKEFFLGWFMEPLTKGRYPDIMREIVGSRLPNFTEAEAELVAGSYDFLGLNYYTTQYAQAKPNPVTWANHTAMMDPGAKLTYNNSRGENLGPLFVKDEKNGNAYYYPKGIYYVMDYFKTKYSNPLIYITENGFSTPGEENRDKAIADSKRIDYLCSHLCFLRKVIREKGVNIKGYFAWALGDNYEFCKGFTVRFGLSYVNWTDLNDRNLKDSGKCSQMHETLYPTIMIIFIS

SEQ ID NO: 762 - protein, 337 aa, Brassica napus
MVDTKHRCYGGNSSTEPYIVAHNQLLAHATVVDLYRTKYKFQKGKIGPVMITRWFLPFDESDPASIEAAERMNQFFHGLYIYIYIYIYNQKCISIYCIYPLTKGRYPDIMRQIVGSRLPNFTEEEAELVAGSYDFLGLNYYVTQYAQPKPNPYPSETHTAMMDAGVKLTYDNSRGEFLGPLFVEDEVNGNSYYYPKGIYYVMDYFKTKYGDPLIYVTENGFSTPSSENREQAIADYKRIDYLCSHLCFLRKVIKEKGVNVRGYFAWALGDNYEFCKGFTVRFGLSYVNWEDLDDRNLKESGKWYQRFINGTVKNSAKQDFLRSSLSSQSRKKRLADA

SEQ ID NO: 763 - protein, 545 aa, Brassica napus
MKLLGLALVFLLASASCKADEEITCEENNPFTCSNTDILSSKNFGKDFIFGVASSAYQAWRGRGVNVWDGFSHRYPEKSGSDLKNGDTTCESYTRWQKDVDVMGELNATGYRFSFAWSRIIPKGKVSRGVNQGGLDYYHKLIDALLEKNITPFVTLFHWDLPQTLQDEYEGFLDRQIIQDFKDYADLCFKEFGGKVKHWITINQLYTVPTRGYAVGTDAPGRCSPMVDTKHRCYGGNSSTEPYIVAHNQLLAHATVVDLYRTKYKFQKGKIGPVMITRWFLPFDESDPASIEAAERMNQFFHGWYMEPLTKGRYPDIMRQIVGSRLPNFTEEEAALVAGSYDFLGLNYYVTQYAQPKPNPYPSETHTAMMDAGVKLTYDNSRGEFLGPLFVEDKDNGNSYYYPKGIYYVMDYFKTNYGNPLIYVTENGFSTPSSENREQAIADYKRIDYLCSHLCFLRKVIKEKGVNVRGYFAWALGDNYEFCKGFTVRFGLSYVNWDDLDDRNLKESGKWYQRFINGTVKNLAKQDFLRSSLSSQSQKKRLSDA

SEQ ID NO: 764 - protein, 527 aa, Brassica napus
MKLLHGLALVFLLAAASCKADEEITCEENNPFTCSNTDILSSKNFGKDFIFGIEGGRGRGVNVWDGFSHRYPEKSGSDLKNGDTTCESYTRWQKDVDVMGELNATGYRFSFAWSRIIPKGKVSRGVNQGGLDYYHKLIDALLEKNITPFVTLFHWDLPQTLQDEYEGFLDRQIIQDFKDYADLCFKEFGGKVKHWITINQLYTVPTRGYAVGTDAPEPYIVAHNQLLAHATVADHYRKNYAVSSLDIAKKGKIGPVMITRWFLPYDESDPASIEAAERMNQFFHGWYMEPLTKGRYPDIMRQIVGSRLPNFTEEEAELVAGSYDFLGLNYYVTQYAQPKPNPYPSETHTAMMDAGVKLTYDNSRGEFLGPLFVEDEVNGNSYYYPKGIYYVMDYFKTKYGDPLIYVTENGFSTPSSENREQAIADYKRIDYLCSHLCFLRKVIKEKGVNVRGYFAWALGDNYEFCKGFTVRFGLSYVNWEDLDDRNLKESGKWYQRFINGTVKNSAKQDFLRSSLSSQSQKKRLADA

SEQ ID NO: 765 - protein, 546 aa, Brassica napus
MKLLHGLALVFLLAAASCKADEEITCEENNPFTCSNTDILSSKNFGKDFIFGVASSAYQAWRGRGVNVWDGFSHRYPEKAGSDLKNGDTTCESYTRWQKDVDVMGELNATGYRFSFAWSRIIPKGKVSRGVNQGGLDYYHKLIDALLEKNITPFVTLFHWDLPQTLQDEYEGFLDRQIIQDFKDYADLCFKEFGGKVKHWITINQLYTVPTRGYAVGTDAPGRCSPMVDTKHRCYGGNSSTEPYIVAHNQLLAHATVVDLYRTKYKFQKGKIGPVMITRWFLPFDESDPASIEAAERMNQFFHGWYMEPLTKGRYPDIMRQIVGSRLPNFTEEEAELVAGSYDFLGLNYYVTQYAQPKPNPYPSETHTAMMDAGVKLTYDNSRGEFLGPLFVEDKVNGNSYYYPKGIYYVMDYFKTKYGDPLIYVTENGFSTPSSENREQAIADYKRIDYLCSHLCFLRKVIKEKGVNVRGYFAWALGDNYEFCKGFTVRFGLSYVNWEDLDDRNLKESGKWYQRFINGTVKNAVKQDFLRSSLSSQSQKKRFADA

SEQ ID NO: 766 - protein, 487 aa, Brassica nigra
MKHLWFALAFLLALAICKADEEITCEENLPFTCGQTDRFNSSSFEKDFIFGLASSAYQACNICYISTIRGKRSRGVHQGGINYYHGLINGLIEKGITPLVTLFHWDLPQVLQDDYEGFLDPQIIDDFRDYADLCFEEFGDKVKHWFTINQLYSVPTRGYGLGSDAPGRCSPKVDPTCYAGNSSTEPYIVAHNQLLAHARVVDLYRTKYKHQGGKIGPVMITRWFLPYNDTDQDSIAATERMKEFFLGWFMGPLTNGTYPQIMIDTVGERLPSFTPEESKLVKGSYDFLGLNYYFSQYVQPSPNRVDWDRHIAMMDAGTKLTYRNASNHLIGPVFAEHREDETRNIYYYPKGIYYVMDYFKTKYNNPLIYITENGILTSGDETREEAKFDYRRIDYLCSHLCFLSKVIKETGVKVKGYCAWSLGDNYEFGQGFTVRFGLTYIDWNNVTDRDLKESGQWFKKFIATKNLAKKDFLRSSLTFEKKKFADA

SEQ ID NO: 767 - protein, 259 aa, Brassica nigra
MAEFFIDGGGLIVEKGIEGGGISELEGMINQDPIMEMETLLVTHFHTGRDDFKDYADLCFQEFGHKVKNWLTINQLYTVPTRGYGLGSDAPGRCSPMVDPTCYAGNSSTEPYIVARNQLLAHATVVDLYRKNYTHQGGKIGAVMITRWFLPYNDTDPDSIAATERMKEFFLGWFMGPLTNGTYPQIMIDAVGDRLPPFSPEESKLVKDSYDFLGLNYYVTQYVQPSPNQVDWANYTAMMDANATLTCMIHLYLPISFLN

SEQ ID NO: 768 - protein, 447 aa, Brassica nigra
MKLLHGLALVFLLATTSCKADEEITCEENNPFTCSNTDILSKGKVSRGVNQGGLQYYHKLIDALLEKNITPFVTLYHWDLPQTLQDEYEGFLDRQIIQDFKDYADLCFKEFGGKVKHWITINQLYTVPTRGYALGTDAPGRCSYMVDNKHRCYGGNSSTEPYIVAHNQLLAHATIVDLYRTKYKFQKGKIGPVMITRWFLPYDESDPSCVEAAERMNQFFHGWYMEPLTKGRYPDIMRQIVGSRLPNFTEAEAELVAGSYDFLGLNYYVTQYAQPKPNPYPSETHTALMDAGFVEDKDNGNSYYYPKGIYYVMDYFKTKYGDPLIYVTENGFSTPTTENRGEAIADYKRIDYLCSHLCFLRKVIKEKGVNVRGYFAWALGDNYEFCKGFTVRFGLSYVNWDDLDDRNLKESGKWYQRFINGTAKNPAKQDFLRSSVSSQSQKKRLAC

SEQ ID NO: 769 - protein, 476 aa, Brassica nigra
MAQGSINTNTYIYLLTMKLHGLALIGFLIAAASCKAIEDINCQENEPFTCGNTDQLSKGKVSRGVNKGGLEYYHKLIDGLVAKNITPFVTLYHWDLPQTLQDEYEGFLNRTIIDDFRDYADLCFKEFGGKVKNWITINQLYTVPTRGYAIGTDAPGRCSPKVDERCYGGNSSTEPYIVAHNQLLAHAAAVDVYRTKYKFQGGKIGPVMITRWFLPFDETDKASLDAADRMKEFFLGWFMEPLTKGRYPDIMRQIVGSRLPNFTEAEAELVAGSYDFLGLNYYTTQYAQPKPNPVTWENHTAMMDPGAKLTFDVYTYASFSQFVKDEINGDAYYYPKGIYYVMDYFKTKYRNPLIYITENGFSTPGDETREEAIADSKRIDYLCSHLCFLRKVIREKRVNIKGYFAWALGDNYEFCKGFTVRFGLSYVNWTNLDDRNLKESGKWYQSFINGTSKNPAKQDFLRPNLSFQNQKKLADA

SEQ ID NO: 770 - protein, 392 aa, Brassica nigra
MYNIYMYARAEGKVSRGVNQGGLDYYHQLIDALLEKNITPFVTLFHWDLPQTLQDEYEGFLDRQIIQDFKDYADLCFNEFGGKVKHWITINQLYTVPTRGYASGTDAPGRCSYMVDTKHRCYGGNSSTEPYIVAHNQLLAHAAVVDLYRTKYKFQNGKIGPVMITRWYMEPLTKGRYPDIMRQIVGSRLPNFTEEEAALVAGSYDFLGLNYYVTQYAQPQPNPYPSETHTAMMDPGVKLTYKVNGNSYYYPKGIYYVMDFFKTNYSNPLIYITENGISSPGTENRCEAIADYKRIDYLCSHLCFLRKVIREKGVNVRGYFAWALGDNYEFCKGFTVRFGLSYVNWDDLDDRNLKESGKWYQRFINGTVKNHADQDFLRSSLSSQSQKKRLAC

SEQ ID NO: 771 - protein, 306 aa, Brassica rapa
MGELNATGYRFSFAWSRIIPITCINEMILYNMHRQDFKDYADLCFKEFGGKVKHWITINQLYTVPTRGYAVGTDAPGRCSPMVDTKHRCYGGNSSTEPYIVAHNQLLAHATVVDLYRTKYKFQKGKIGPVMITRWFLPFDESDPASIEAAERMNQFFHGCYYYPKGIYYVMDYFKTKYGDPLIYVTENGFSTPSEENREQAIADYKRIDYLCSHLCFLRKVIKEKGVNVRGYFAWALGDNYEFCKGFTVRFGLSYVNWEDLDDRNLKESGKWYQRFINGTVKNAVKQDFLRSSLSSQSQKKRFADA

SEQ ID NO: 772 - protein, 262 aa, Brassica rapa
MQKDVDVMGELNATGYRFSFAWSRIIPKGKVSRGVNQGGLDYYHKLIDALLEKNITPFVTLFHWDLPQTLQDEYEGFLDRQIIQDFKDYADLCFKEFGGKVKHWITINQLYTVPTRGYAIGTDAPGRCSPMVDTKHRCYGGNSSTEPYIVAHNQLLAHATVVDLYRTKYKFVEDKVNGNSYYYPKGIYYVMDYFKTKYGDPLIYVTENGFSTPSSENREQAIADYKRIDYLCSHLCFLRKVINYIMTSEDDEERGKITKFKT

SEQ ID NO: 773 - protein, 443 aa, Brassica oleracea
MQLRMVVSFHFRSKEGEVVVLTFGMASVTDIQKSGSHKLIDALLEKNITPFVTLFHWDLPQTLQDEYEGFLDRQIIQDFKDYADLCFKEFGGKVKHWITINQLYTVPTRGYAIGTDAPGRCSPMVDTKHRCYGGNSSTEPYIVAHNQLLAHATVVDLYRTKYKFQKGKIGPVMITRWFLPFDESDPASIEAAERMNQFFHGWYMEPLTKGRYPDIMRQIVGSRLPNFTEEEAELVAGSYDFLGLNYYVTQYAQPKPNPYPSETHTAMMDAGVKLTYDNSRGEFLGPLFVEDKVSGNSYYYPKGIYYVMDYFKTKYGDPLIYVTENGFSTPSSENREQAIADYKRIDYLCSHLCFLRKVIKEKGVNVRGYFAWALGDNYEFCKGFTVRFGLSYVNWEDLDDRNLKESGKWYQRFINGTVKNSAKQDFLRSSLSSQSQKKRLADA

SEQ ID NO: 774 - protein, 335 aa, Brassica campestris
MKLQKDVDVMGELNATGYRFSFAWLRIIPKGKASRGVNQGGLDYYHKLIDALLEKNITPFVTLFHWDLPQTLQDEYEGFLDRQIIQDFKDCADLCFKEFGGKVKHWITINQLYTVPTRGYAVGTDAPGRCSPMVDTKHRCYGGNSSTEPYIVAHNQLLAHATVVDLYRTKYKFQKGKIGPVKITRWFLPFDESDPATIEAAESMNQFFHGWYMEPLTKGRYPDIMRQIVGSRLPNFTEEEAQLVAGSYDFLGLNYYVTQYAQPKPNPYPSETHTAMMDAGVKLTYKDNGNSYYYPKGIYYVMDYFKTNYGNPLIYVTENGEFYILLLLYFHLYHA

SEQ ID NO: 775 - protein, 484 aa, Brassica oleracea
MKLLHGLALVFLLAAASCKADEEITCEENNPFTCSNTDILSSKNFGKDFIFGVASSAYQASEGKVSRGVNQGGLDYYHKLIDALLEKNITPFVTLFHWDLPQTLQDEYEGFLDRQIIQDFKDYADLCFKEFGGKVKHWITINQLYTVPTRGYAIGTDAPGRCSPMVDTKHRCYGGNSSTEPYIVAHNQLLAHATVVDLYRTKYKFQKGKIGPVMITRWFLPFDESDPASIEAAERMNQFFHGWYMEPLTKGRYPDIMRQIVGSRLPNFTEEEAELVAGSYDFLGLNYYVTQYAQPKPNPYPSETHTAMMDAGVKLTYDNSRGEFLGPLFVEDKVSGNSYYYPKGIYYVMDYFKTKYGDPLIYVTENGFSTPSSENREQAIADYKRIDYLCSHLCFLRKVIKEKGVNVRGYFAWALGDNYEFCKGFTVRFGLSYVNWEDLDDRNLKESGKWYQRFINGTVKNSAKQDFLRSSLSSQSQKKRLADA

SEQ ID NO: 776 - protein, 294 aa, Brassica napus
MGSDSTPQLPVIYLSDQTLKPGSEKWVEVRSDVRKALEDYGAFEVPYDRVSEELKQSVLEAMKELFELPVEAKRRNVSPKPYTGYSTHNGLSESLGIQDPEVLEKVNEFTQLLRPDCEGNKSISETIQKFSEKLAELDVMVRRMVMESFGIEKYFDEHLKSTNYRLRLMKYIAPPDIEGLEVLNKDEKWIRLKPSRNSFVVMAGDSVYALMNGRLFRPFHRVRVTEKKKTRYSIALFSTPIAGYIIEPPKELVDEKHPRVFKPFTYVDLMSFYHTEAGRRARSTLHAYCAVSEA

SEQ ID NO: 777 - protein, 294 aa, Brassica napus
MGSDSTPQLPVIYLSDQTLKPGSEKWVEVRNDVRKALEDYGAFEVSYDRVSEELKQSVLEAMKELFELPVEAKRRNVSPKPYTGYSTHNGLSESLGIQDAEVLEKVNEFTQLLRPDFEGNKSISETIQKFSEKLAELDVMVRRMVMESFGIEKYFDEHLKSTNYRLRLMKYIAPPDIEGLEVLNKDEKWIRLKPSRNSFVVMAGDSVYALMNGRLFRPFHRVRVTEKKKTRYSIALFSTPNAGYIIEPPKELVDEKHPRVFKPFTYVDLMSFYHTEGGRRARSTLHAYCAVSEA

SEQ ID NO: 778 - protein, 402 aa, Brassica napus
MGADTPQLPVIYLSDQTLKPGSEKWVEVRSDVRKALEDYGAFEVSYDRVSEELKKSVLDAMIELFELPVEAKQRNVSPKPYTGYSTHNGLSESLGIQDSNVLEKVNEFTQLLRPDCEGNKTMSETIQNFSEKLAELDVMVRRMVIESFGIENYFDEHLKSTNYRLRLMKYVAPPDVDANVAVGTKDSDDGANTNTTANADADDIANGIAKVHIDDDADAKGDSNVDVGTNVSAKSSANTGTRTSATVGVSDSVKANGGADDEEKKLGLPSHTDKNLLTVLYQYEIEGLEVLTKDEKWIRLKPCHNSFVVMAGDSLYALMNGRLSRPFHRVRVTERKKTRYSIALFSTPNGDYIIEPPKELVDEKHPRLFKPFTYVDLMSFYHTEAGRRPHSTLHAYCAVSGA

SEQ ID NO: 779 - protein, 439 aa, Brassica napus
MGADTPQLPVIYLSDQTLKPGSEKWLEVRSDVRKALEEYGGFEVSYDKVSEELKKSVLDAMIELFELPVEAKQRNVSPKPYTGYSTHNGLSESLGIQDSNVLEKVNEFTQLLRPDCEGNKTMSETIQNFSEKLAELDVMVRRMVIESFGIENYFDEHLKSTNYRLRLMKYVAPPDVDANVAVGTKDSDDGANTNTTANADADDIANGIAKVHIDDDADAKGDVCTGAGTNHNGDDVNTGDCANVKSNVDVGTNVSAKSSVGADVNTGTIDDVNANAGTRSSANVGVSDSVKANGGADDEEKKLGLPSHTDKNLLTVLYQYEIEGLEVLTKDEKWIRLKPSHNSFVVMAGDSLYALMNGRLSRPFHRVRVTERKKTRYSIALFSTPNGDYIIEPPKELVDEKHPRLFKPFTYVDLMSFYHTEAGRRARSTLHAYCAVSGA

SEQ ID NO: 780 - protein, 358 aa, Brassica napus
MGSDSTPQLPVIYLSDQTLKPGSEKWVEVRSDVRKALEDYGAFEVSYDRVSEELKESVLETMKELFQLPVEAKRRNVSPKPYTGYMTHNGVSESLGIQDANVLEKVNEFTQLLRPDCEGNKSTSERIHKFSEKLAELDVMVRRMVFESFGIEDYFDENLKSMNYRLRLMKYTAPRDVDTNVAAGANDAGDGANTNNNGNTGADAGAGDSASTGDNDKVVASDDANAGADTNDIVVGIANVHIDDDANDVAKANGDVGAGVDANTNDCASVKSNADVDNVNANASVGTNGDGDTNANVGAHLEEKKLGLPSHTDKNLLTVLYQHEIEGLEVLTKDEKWIRLKPSHNSFVVIAGDSLYVR

SEQ ID NO: 781 - protein, 432 aa, Brassica nigra
MGSDSTPQLPVIYLSDQTLKPGSEKWVEVRSDVRKALEDYGAFEVSYDRVSEELKESVLEAMKELFDLPVEAKQRNVSPKPYTGYSTHNGLSESLGIQDAEVLEKVNEFTQLLRPDCEGNKSISETIQKFSEKLAELDVMVRRMVMESFGIEKYFDEHLKSTNYRLRLMKYIAPPEVDTNVAVGTNDAGDGANDASASDKANVFAGDEDNVGADTSDIANGIANVHIDDDAKANGDIGADVDAKTSDCANVESKADVSTDVNANSDSNANTGTLSSASVGDIVKANGGADDEEKKLGLPSHTDKNLFTVLYQYEIEGLEVLTKDEKWIRLKPSHNSFVVMAGDSAYALMNGRLFRPFHRVRVTEKKKTRYSIALFSTPNAGNIIEPPKELVDEKHPRVFKPFPYVDLMSFYHTEAGRRARSTLHAYCAVSEA

SEQ ID NO: 782 - protein, 540 aa, Raphanus sativus
MTTMMSLTTSLPYPFQILLVFILSMASITLLGRILSRPTKTKDRSRQLPPGPPGWPILGNLPELMMTRPRHKYIDIALKGQKPEIACFNFAGTHAIVINSDEIAREALKERDADFADRPNLFNMRTIGGNHKSMGNSPYGEQFIKMKRVITTEIMSVRTLNMLVAARTIEADNLLAYLLSMYKRSEKADVREFSRAYGYAVTMRMMFGRRHVTKENVFSDEGRLGEAEKDHLDAIFETLNCLPSFSPADYLEKWFRGWNIDGQEERVVRYVNKVRSYNNPIIDERVELWREKGGKAAVEDWIDTFITLKDENGKYYITPDEVKGQCVEFCIAAIDNPANNMEWTLAEMLKNPEILKKALKELDEVVGRDRLVQESDIPNLNYLKACCRETFRIHPSAHYVPTHVARQDTTLGGYFIRKGSHIHVARPGIGRSSKVWKDPLVYKPERHLEVDGVSKELSLVETELRFVSFGTGRRGCIGVKVGTIMMVIMLARFLQAFNWKLHPGYGPLSLEEDDALLMAKPLLLSVEPRLAPNLYPKFCP

SEQ ID NO: 783 - protein, 540 aa, Brassica napus
MTMMMSLTTSLPYPFQILLVFILSMASITLLGRILSRPTKTKDRSRQLPPGPPGWPILGNLPELMMTRPRHKYVDIAMKGQKPDIACFNFAGTHAIIINSDEIAREALKERDADFADRPNLFNMRTIGGNHKSMGNSPYGEQFMKMKRVITTEIMSVKTLNMLVAARTIEADNLLAYLLSMYKRSETADVREFSRVYGYAVTMRLLFGRRHVTKENVFSDEGRLGQAEKDHLDAIFETLNCLPSFSPADYLEKWFRGWNIDGQEERVVMYCNKVRSYNNPIIDERVELWREKGGKAAVEDWIDTFITLKDENGKYYITPDEVKAQCVEFCIAAIDNPANNMEWTLAEMLKNPEILKKALKELDEVVGRDRLVQESDIPNLNYLKACCRETFRIHPSAHYVPTHVARQDTTLGGYFIPKGSHIHVGRPGIGRSSKIWTDPLVYKPERHLEGDGISKELSLVETELRFVSFGTGRRGCVGVKVGTIMMVIMLARFLQAFNWKLHPGYGPLSLEEDDALLMAKPLLLSVEPRLAPNLYPKFCP

SEQ ID NO: 784 - protein, 540 aa, Brassica napus
MTMMMSLTTSLPYPFQILLVFILSMASISLLGRILSRPTKTKDRSRQLPPGPPGWPILGNLPELMMTRPRHKYIDIALKGQNPEIACFNFAGTHAIVINSDEIAREALKERDADFADRPNLFNMRTIGGNHKSMGNSPYGEQFMKMKRVITTEIMSVKTLNMLVAARTVEADNLLAYLLSMYKRSETADVREFSRVYGYAVTMRLLFGRRHITKENVFSDEGRLGQAEKDHLDAIFETLNCLPSFSPADYLEKWFRGWNIDGQEERVVMYCNKVRSYNNPIIDERVELWREKGGKAAVEDWIDTFITLKDENGKYYITPDEVKAQCVEFCIAAIDNPANNMEWTLAEMLKNPEILKKALKELDEVVGRDRLVQESDIPNLNYLKACCRETFRIHPSAHYVPTHVARQDTTLGGYFIPKGSHIHVGRPGIGRSSKVWKDPLVYKPERHLEGDGISKELSLVESELRFVSFGTGRRGCVGVKVGTIMMVIMLARFLQAFNWKLHPGYGPLSLEEDDALLMAKPLLLSVEPRLAPNLYPKFCP

SEQ ID NO: 785 - protein, 541 aa, Brassica nigra
MTMMMMSLTTSLPYPFQILLVFILSIASITLLGRILSRPTKTKDRSRQLPPGPPGWPILGNLPELMKTRPRHKYFEIATKGQKPEIACFNFAGTHTIIINSDEIAREAFKERDADFADRPNTFNMRTIGGNHKSMGNTPTGEQFMKMKRVITSEIMSVKTLNMLVAARNIEADNLLAYLLSIYKRSETADVREISRNYGYAVTMRMMFGRRHVTKENVFSDEGRLGPAEKDHLDAIFETLNCLPSFSPADYLEKWFLGWNVDGLEERVTVNCNKVRSYNNPIIDERVELWREKGGKAAVEDWIDTFITLKDENGKYYITPDEVKGQCVEFCIAAIDNPANNMEWTLAEMLKNPEILKKALKELDEVVGRDRLVQESDIPNLNYLKACCRETFRVHPSAHYVPTHVARRDSTLGGYFIPKGSHIHVARPGIGRSSKVWKDPLVYKPERHLEGNGISKELSLVENEMRLVSFGTGRRGCIGVKVGTIMMVIMLARFLQAFNWKLHPSYGPLSLEEDDALLMAKPLLLSVEPRLAPNLYPKFYP

SEQ ID NO: 786 - protein, 540 aa, Brassica campestris
MTMMMSLTTSLPYPFQILLVFILSMASISLLGRILSRPTKTKDRSRQLPPGPPGWPILGNLPELMMTRPRHKYIDIALKGQKPEIACFNFAGTHAIVINSDEIAREALKERDADFADRPNLFNMRTIGGNHKSMGNSPYGEQFMKMKRVITTEIMSVKTLNMLVAARTVEADNLLAYLLSMYKRSETADVREFSRVYGYAVTMRLLFGRRHITKENVFSDEGRLGQAEKDHLDAIFETLNCLPSFSPADYLEKWFRGWNIDGQEERVVMYCNKVRSYNNPIIDERVELWREKGGKAAVEDWIDTFITLKDENGKYYITPDEVKAQCVEFCIAAIDNPANNMEWTLAEMLKNPEILKKALKELDEVVGRDRLVQESDIPNLNYLKACCRETFRIHPSAHYVPTHVARQDTTLGGYFIPKGSHIHVGRPGIGRSSKVWKDPLVYKPERHLEGDGISKELSLVESELRFVSFGTGRRGCVGVKVGTIMMVIMLARFLQAFNWKLHPGYGPLSLEEDDALLMAKPLLLSVEPRLAPNLYPKFCP

SEQ ID NO: 787 - protein, 540 aa, Brassica oleracea
MTMMMSLTTSLPYPFQILLVFILSMASITLLGRILSRPTKTKDRSRQLPPGPPGWPILGNLPELMMTRPRHKYVGIAMEGQKPDIACFNFAGTHAIIINSDEIAREALKERDADFADRPNLFNMRTIGGNHKSMGNTPYGEQFMKMKRVIRTEIMSVKTLNMLEAARTIEADNLLAYLLSMYKRSETADAREFSRGYGYAVTMRLLFGRRHVTKENVFSDEGRLGQAEKDHLDAIFETLNCLPSFSPADYLEKWFRGWNIDGQEERVVMSCNKVRSYNNPIIDERVELWREKGGKASVEDWIDTFITLKDENGKYYITPDEVKAQCVEFCIAAIDNPANNMEWTLAEMLKNPEILKKALKELDEVVGRDRLVQESDIPNLNYLKACCRETFRIHPSAHYVPTHVARQDTTLGGYFIPKGSHIHVGRPGIGRSSKIWTDPLVYKPERHLEGDGISKELSLVETELRFVSFGTGRRGCVGVKVGTIMMVIMLARFLQAFNWKLHPGYGPLSLEEDDALLMAKPLLLSVEPRLAPNLYPKFCP

SEQ ID NO: 788 - DNA, 175 bp, Artificial
  edited CYP79F1 allele
  misc_feature (26)..(27): n is a, c, g, or t
acaatgatgatgatgagccttaccanncatcgttaccgtacccttttcaaatcctactagtctttatcttgtccatagcatccatcactttgcttggccgaatactatcaagacccacaaaaaccaaagaccggtctcgtcagcttcctcctggaccaccaggatggcccatcct

SEQ ID NO: 789 - DNA, 172 bp, Artificial
  edited CYP79F1 allele
acaatgatgatgatgagccttaccacgttaccgtacccttttcaaatcctactagtctttatcttgtccatagcatccatcactttgcttggccgaatactatcaagacccacaaaaaccaaagaccggtctcgtcagcttcctcctggaccaccaggatggcccatcctcg

SEQ ID NO: 790 - DNA, 172 bp, Artificial
  edited CYP79F1 allele
acaatgatgatgatgagccttacatcgttaccgtacccttttcaaatcctactagtctttatcttgtccatagcatccatcactttgcttggccgaatactatcaagacccacaaaaaccaaagaccggtctcgtcagcttcctcctggaccaccaggatggcccatcctcg

SEQ ID NO: 791 - DNA, 175 bp, Artificial
  edited CYP79F1 allele
  misc_feature (26)..(27): n is a, c, g, or t
ttttcaaatcctactagtctttatcnnttgtccatagcatccatcactttgcttggccgaatactatcaagacccacaaaaaccaaagaccggtctcgtcagcttcctcctggaccaccaggatggcccatcctcggcaatttacccgaactaatgaagactcgtcctaggcaca

SEQ ID NO: 792 - DNA, 171 bp, Artificial
  edited CYP79F1 allele
ttttcaaatcctactagtctttatcccatagcatccatcactttgcttggccgaatactatcaagacccacaaaaaccaaagaccggtctcgtcagcttcctcctggaccaccaggatggcccatcctcggcaatttacccgaactaatgaagactcgtcctaggcacaaa

SEQ ID NO: 793 - DNA, 171 bp, Artificial
  edited CYP79F1 allele
ttttcaaatcctactagtcttttgtccatagcatccatcactttgcttggccgaatactatcaagacccacaaaaaccaaagaccggtctcgtcagcttcctcctggaccaccaggatggcccatcctcggcaatttacccgaactaatgaagactcgtcctaggcacaaa

SEQ ID NO: 794 - DNA, 170 bp, Artificial
  edited CYP79F1 allele
acaatgatgatgatgagccttaccattaccgtacccttttcaaatcctactagtctttatcttgtccatagcatccatcactttgcttggccgaatactatcaagacccacaaaaaccaaagaccggtctcgtcagcttcctcctggaccaccaggatggcccatcctcg

SEQ ID NO: 795 - DNA, 170 bp, Artificial
  edited CYP79F1 allele
ttttcaaatcctactagtctttgtccatagcatccatcactttgcttggccgaatactatcaagacccacaaaaaccaaagaccggtctcgtcagcttcctcctggaccaccaggatggcccatcctcggcaatttacccgaactaatgaagactcgtcctaggcacaaa

SEQ ID NO: 796 - DNA, 170 bp, Artificial
  edited CYP79F1 allele
atttgaaaagggtacggtaatggtaaggctcatcatcatcattgtcatgatgtttgtgtgtgtgagtttagagagagatgtgtgctcgttagcaatgaacactaacaagtttgagaaactgtctcttgtgttttaactatttatagatccgatatcatgcatgtgatgct

SEQ ID NO: 797 - DNA, 170 bp, Artificial
  edited CYP79F1 allele
atttgaaaagggtacggtaacgatgaggctcatcatcatcattgtcatgatgtttgtgtgtgtgagtttagagagagatgtgtgctcgttagcaatgaacactaacaagtttgagaaactgtctcttgtgttttaactatttatagatccgatatcatgcatgtgatgct

SEQ ID NO: 798 - DNA, 170 bp, Artificial
  edited CYP79F1 allele
atttgaaaagggtacggtaacgataaggctcatcatcatcattgtcatgatgtttgtgtgtgtgagtttagagagagatgtgtgctcgttagcaatgaacactaacaagtttgagaaactgtctcttgtgttttaactatttatagatccgatatcatgcatgtgatgct

SEQ ID NO: 799 - DNA, 170 bp, Artificial
  edited CYP79F1 allele
gcaaagtgatggatgctatggacaaagactagtaggatttgaaaagggtacggtaacgatgtggtaaggctcatcatcatcattgtcatgatgtttgtgtgtgtgagtttagagagagatgtgtgctcgttagcaatgaacactaacaagtttgagaaactgtctcttgt

SEQ ID NO: 800 - DNA, 172 bp, Artificial
  edited AOP2 allele
ctttcatggcttccaaaaccgatttaagctcctctgacactctatcatatgacacctcgaacgcgccgtagtcttcaagagctttacggacatcactcctcacttcaacccacttctcacttcctggttttagggtttggtccgagagatggatgactggaagttgaggagt

SEQ ID NO: 801 - DNA, 168 bp, Artificial
  edited AOP2 allele
ctttcatggcttccaaaacttaagctcctctgacactctatcatatgacacctcgaacgcgccgtagtcttcaagagctttacggacatcactcctcacttcaacccacttctcacttcctggttttagggtttggtccgagagatggatgactggaagttgaggagt

SEQ ID NO: 802 - DNA, 166 bp, Artificial
  edited AOP2 allele
ctttcatggcttccaaaacaagctcctctgacactctatcatatgacacctcgaacgcgccgtagtcttcaagagctttacggacatcactcctcacttcaacccacttctcacttcctggttttagggtttggtccgagagatggatgactggaagttgaggagt

SEQ ID NO: 803 - DNA, 166 bp, Artificial
  edited AOP2 allele
ctttcatggcttccaaaaccgactcctctgacactctatcatatgacacctcgaacgcgccgtagtcttcaagagctttacggacatcactcctcacttcaacccacttctcacttcctggttttagggtttggtccgagagatggatgactggaagttgaggagt

SEQ ID NO: 804 - DNA, 174 bp, Artificial
  edited AOP2 allele
ttttagggtttggtccgagagatgatgactggaagttgaggagtactgtctgaacccattcttctttcctttggtgcatatccaaaaaaatacatttacaaatgtaaattagcttttaacttaactcaatttttagttagctctttaatatataacaacaaatgaaagcgcgtt

SEQ ID NO: 805 - DNA, 174 bp, Artificial
  edited AOP2 allele
ctttcatggcttccaaaaccgattcttaagctcctctgacactctatcatatgacacctcgaacgcgccgtagtcttcaagagctttacggacatcactcctcacttcaacccacttctcacttcctggttttagggtttggtccgagagatggatgactggaagttgaggagt

SEQ ID NO: 806 - DNA, 171 bp, Artificial
  edited AOP2 allele
ttttagggtttggtccgagagatgactggaagttgaggagtactgtctgaacccattcttctttcctttggtgcatatccaaaaaaatacatttacaaatgtaaattagcttttaacttaactcaatttttagttagctctttaatatataacaacaaatgaaagcgcgtt

SEQ ID NO: 807 - DNA, 168 bp, Artificial; identical to SEQ ID NO: 801
  edited AOP2 allele

SEQ ID NO: 808 - DNA, 164 bp, Artificial
  edited AOP2 allele
ctttcatggcttccaataagctcctctgacactctatcatatgacacctcgaacgcgccgtagtcttcaagagctttacggacatcactcctcacttcaacccacttctcacttcctggttttagggtttggtccgagagatggatgactggaagttgaggagt

SEQ ID NO: 809 - DNA, 164 bp, Artificial
  edited AOP2 allele
ctttcatggcttccaaaaagctcctctgacactctatcatatgacacctcgaacgcgccgtagtcttcaagagctttacggacatcactcctcacttcaacccacttctcacttcctggttttagggtttggtccgagagatggatgactggaagttgaggagt

SEQ ID NO: 810 - DNA, 168 bp, Artificial
  edited AOP2 allele
ctttcatggcttccaaaaccgattctcctctgacactctatcatatgacacctcgaacgcgccgtagtcttcaagagctttacggacatcactcctcacttcaacccacttctcacttcctggttttagggtttggtccgagagatggatgactggaagttgaggagt

SEQ ID NO: 811 - DNA, 174 bp, Artificial
  edited AOP2 allele
acagtactcctcaacttccagtcaccatctctcggaccaaaccctaaaaccaggaagtgaaaagtgggttgaagtgaggagtgatgtccgtaaagctcttgaaaactacggcgcgttcgaggtgtcatatgatagagtgtcagaggagcttaaggaatcggttttggaagccat

SEQ ID NO: 812 - DNA, 171 bp, Artificial; identical to SEQ ID NO: 806
  edited AOP2 allele

SEQ ID NO: 813 - DNA, 173 bp, Artificial
  edited AOP2 allele
ctttcatggcttccaaaaccgattctaagctcctctgacactctatcatatgacacctcgaacgcgccgtagtcttcaagagctttacggacatcactcctcacttcaacccacttctcacttcctggttttagggtttggtccgagagatggatgactggaagttgaggagt

SEQ ID NO: 814 - DNA, 169 bp, Artificial
  edited AOP2 allele
ctttcatggcttccaaaaccttaagctcctctgacactctatcatatgacacctcgaacgcgccgtagtcttcaagagctttacggacatcactcctcacttcaacccacttctcacttcctggttttagggtttggtccgagagatggatgactggaagttgaggagt

SEQ ID NO: 815 - DNA, 169 bp, Artificial
  edited AOP2 allele
ctttcatggcttccaaaaccgattcctcctctgacactctatcatatgacacctcgaacgcgccgtagtcttcaagagctttacggacatcactcctcacttcaacccacttctcacttcctggttttagggtttggtccgagagatggatgactggaagttgaggagt

SEQ ID NO: 816 - DNA, 171 bp, Artificial; identical to SEQ ID NO: 806
  edited AOP2 allele

1-89. (canceled)

90. A mustard plant or part thereof comprising at least one mutation in an endogenous gene encoding a myrosinase (i.e., glucosinolase, thioglucosidase (e.g., β-thioglucosidase), thioglucoside glucohydrolase; EC 3.2.1.147 (EC 3.2.3.1 transferred to 3.2.1.147)), an endogenous gene encoding a cytochrome P450 mono-oxygenase (i.e., CYP79F1, homomethionine N-monooxygenase; EC 1.14.14.42), and/or an endogenous gene encoding a 2-oxo acid-dependent dioxygenase (i.e., AOP2, 2-oxoglutarate-dependent dioxygenase; EC 1.14.11.M8), optionally, wherein the plant or part thereof comprising at least one mutation in an endogenous gene exhibits a reduction in the activity of the myrosinase, the AOP2, and/or the CYP79F, optionally wherein the at least one mutation is a non-natural mutation.

91. The mustard plant or part thereof of claim 90, wherein the plant or part thereof comprising at least one mutation in an endogenous gene exhibits reduced hydrolysis of glucosinolates (e.g., reduced production/amounts of thiocyanates (e.g., allyl isothiocyanate), reduced production of glucose (e.g., reduced hydrolysis of sinigrin (i.e., allylglucosinolate or 2-propenylglucosinolate and/or reduced amounts/production of alkenyl glucosinolates and/or aliphatic glucosinolates.

92. The mustard plant or part thereof of claim 90, wherein when eaten the plant or part thereof comprising at least one mutation in an endogenous gene exhibits reduced pungency and/or reduced bitterness.

93. The mustard plant or part thereof claim 90, wherein the at least one mutation is a null allele and the null allele is a full knockout mutant CYP79F1 allele, a full knockout mutant AOP2 allele and/or a full knockout mutant myrosinase allele, optionally, wherein the full knockout mutant CYP79F1 allele results in the production of a nonfunctional CYP79F1 protein or no production of a CYP79F1 protein, the full knockout mutant AOP2 allele results in the production of a nonfunctional AOP2 protein or no production of a AOP2 protein, the full knockout mutant myrosinase allele results in the production of a nonfunctional myrosinase protein or no production of a myrosinase protein.

94. The mustard plant or part thereof of claim 90, wherein the mustard plant or part thereof is a kale plant or part thereof, a collard plant or part thereof, a spinach plant or part thereof, a cabbage plant or part thereof, a beet plant or part thereof, a watercress plant or part thereof, a lettuce plant or part thereof (e.g. romaine), a swiss chard plant or part thereof, an arugula plant or part thereof, an endive plant or part thereof, a bok choy plant or part thereof, a rutabaga plant or part thereof, a turnip plant or part thereof, a mustard plant or part thereof, a cabbage plant or part thereof, a broccoli plant or part thereof, a cauliflower plant or part thereof, a Brussels sprout plant or part thereof, a radish plant or part thereof, or a kohlrabi plant or part thereof, optionally, wherein the mustard plant or part thereof is Brassica oleracea (e.g., B. oleracea var. oleracea, B. oleracea var. capitata, B. oleracea var. botrytis, B. oleracea var. gemmifera, B. oleracea var. sabauda, B. oleracea var. gongyiodes, B. oleracea var. italic, B. oleracea var. sabellica, B. oleracea var. acephala), Brassica juncea, Brassica rapa (B. rapa subsp. pekinensis, B. rapa subsp. Chinensis, B. rapa subsp. rapa), Brassica napas, Brassica carinata, Brassica campestris, Brassica nigra or Raphanus raphanistrum (e.g., Raphanus raphanistrum subsp. Sativus).

95. The mustard plant or part thereof of claim 90, wherein the at least one mutation is a base substitution, a base deletion and/or a base insertion.

96. The mustard plant or part thereof of claim 90, wherein the endogenous gene encoding a myrosinase comprising at least one mutation comprises a nucleotide sequence of any one of SEQ ID NOs:141-599, the endogenous gene encoding a cytochrome P450 mono-oxygenase comprising at least one mutation comprises a nucleotide sequence of any one of SEQ ID NOs:788-799, and/or the endogenous gene encoding a 2-oxo acid-dependent dioxygenase comprising at least one mutation comprises a nucleotide sequence of any one of SEQ ID NOs:600-616 or 800-816

97. A mustard plant or part thereof having reduced pungency or bitterness comprising at least one mutation an endogenous myrosinase gene, an endogenous AOP2 gene and/or an endogenous CYP79F 1 gene, wherein the at least one mutation is a substitution, insertion or a deletion that is introduced using an editing system that comprises a nucleic acid binding domain that binds to a target site in the endogenous myrosinase gene, in the endogenous AOP2 gene or in the endogenous CYP79F 1 gene, optionally the at least one mutation is a non-natural mutation.

98. The mustard plant or part thereof of claim 97, wherein the at least one mutation is a null allele and the null mutation is a full knockout mutant CYP79F1 allele, a full knockout mutant AOP2 allele and/or a full knockout mutant myrosinase allele, optionally, wherein the full knockout mutant CYP79F1 allele results in the production of a nonfunctional CYP79F1 protein or no production of a CYP79F1 protein, the full knockout mutant AOP2 allele results in the production of a nonfunctional AOP2 protein or no production of a AOP2 protein, the full knockout mutant myrosinase allele results in the production of a nonfunctional myrosinase protein or no production of a myrosinase protein.

99. The mustard plant or part thereof of claim 97, wherein the at least one mutation is a base substitution, a base deletion and/or a base insertion.

100. The mustard plant or part thereof of claim 97, wherein the endogenous gene encoding a myrosinase comprising at least one mutation is comprises a nucleotide sequence of any one of SEQ ID NOs:141-599, the endogenous gene encoding a cytochrome P450 mono-oxygenase comprising at least one mutation comprises a nucleotide sequence of any one of SEQ ID NOs:788-799, and/or the endogenous gene encoding a 2-oxo acid-dependent dioxygenase comprising at least one mutation comprises a nucleotide sequence of any one of SEQ ID NOs:600-616 or 800-816

101. The mustard plant or part thereof of claim 97, wherein the mustard plant or part thereof is a kale plant or part thereof, a collard plant or part thereof, a spinach plant or part thereof, a cabbage plant or part thereof, a beet plant or part thereof, a watercress plant or part thereof, a lettuce plant or part thereof (e.g. romaine), a swiss chard plant or part thereof, an arugula plant or part thereof, an endive plant or part thereof, a bok choy plant or part thereof, a rutabaga plant or part thereof, a turnip plant or part thereof, a mustard plant or part thereof, a cabbage plant or part thereof, a broccoli plant or part thereof, a cauliflower plant or part thereof, a Brussels sprout plant or part thereof, a radish plant or part thereof, or a kohlrabi plant or part thereof, optionally, wherein the plant or part thereof is Brassica oleracea (e.g., B. oleracea var. oleracea, B. oleracea var. capitata, B. oleracea var. botrytis, B. oleracea var. gemmifera, B. oleracea var. sabauda, B. oleracea var. gongyiodes, B. oleracea var. italic, B. oleracea var. sabellica, B. oleracea var. acephala), Brassica juncea, Brassica rapa (B. rapa subsp. pekinensis, B. rapa subsp. Chinensis, B. rapa subsp. rapa), Brassica napas, Brassica carinata, Brassica campestris Brassica nigra or Raphanus raphanistrum (e.g., Raphanus raphanistrum subsp. Sativus).

102. A mustard plant regenerated from the plant part of claim 90, optionally, wherein the plant exhibits reduced pungency and/or bitterness.

103. A mustard plant regenerated from the plant part of claim 97, optionally, wherein the plant exhibits reduced pungency and/or bitterness.

104. A method for editing a specific site in the genome of a mustard plant cell, the method comprising: cleaving, in a site specific manner, a target site within an endogenous myrosinase gene, an endogenous AOP2 gene and/or an endogenous CYP79F 1 gene, thereby generating an edit in the endogenous myrosinase gene, the endogenous AOP2 gene and/or the endogenous CYP79F1 gene of the plant cell.

105. The method of claim 104, further comprising regenerating a mustard plant from the mustard plant cell comprising an edit in the endogenous myrosinase gene, the endogenous AOP2 gene and/or the endogenous CYP79F1 gene to produce a plant comprising the edit in its endogenous myrosinase gene, endogenous AOP2 gene and/or endogenous CYP79F1 gene, optionally, wherein the edit results in a non-natural mutation.

106. The method of claim 105, wherein the mustard plant comprising the edit in its endogenous myrosinase gene, endogenous AOP2 gene and/or endogenous CYP79F1 gene exhibits reduced pungency and/or bitterness.

107. The method of claim 104, wherein the edit in the endogenous myrosinase gene results in a myrosinase gene having a nucleotide sequence of any one of SEQ ID NOs:141-599, the edit in the endogenous cytochrome P450 mono-oxygenase gene results in a cytochrome P450 mono-oxygenase gene having a nucleotide sequence of any one of SEQ ID NOs:788-799 and/or the edit in the endogenous 2-oxo acid-dependent dioxygenase gene results in a 2-oxo acid-dependent dioxygenase gene having a nucleotide sequence of any one of SEQ ID NOs:600-616 or 800-816.

108. A method of producing a mustard plant or part thereof comprising a mutated endogenous myrosinase gene, a mutated endogenous AOP2 gene and/or a mutated endogenous CYP79F 1 gene and having a phenotype of reduced pungency and/or bitterness, the method comprising contacting a target site in an endogenous myrosinase gene, an endogenous AOP2 gene and/or an endogenous CYP79F 1 gene with a nuclease comprising a cleavage domain and a DNA binding domain (e.g., editing system) comprising a nucleic acid binding domain that binds to the target site in the endogenous myrosinase gene, the endogenous AOP2 gene and/or the endogenous CYP79F 1 gene, thereby producing a mustard plant or part thereof comprising a mutated endogenous myrosinase gene, a mutated endogenous AOP2 gene and/or a mutated endogenous CYP79F 1 gene and having reduced pungency and/or bitterness, optionally wherein the mutation is a base substitution, a base insertion and/or a base deletion.

109. The method of claim 108, wherein the mutated endogenous myrosinase gene comprises a nucleotide sequence of any one of SEQ ID NOs:141-599, the mutated endogenous cytochrome P450 mono-oxygenase gene comprises a nucleotide sequence of any one of SEQ ID NOs:788-799, and/or the mutated endogenous 2-oxo acid-dependent dioxygenase gene comprises a nucleotide sequence of any one of SEQ ID NOs:600-616 or 800-816.

110. A mustard plant or part thereof produced by the method of claim 108, wherein the plant or part thereof exhibits reduced pungency and/or reduced bitterness, optionally, wherein the mustard plant or part thereof is a kale plant or part thereof, a collard plant or part thereof, a spinach plant or part thereof, a cabbage plant or part thereof, a beet plant or part thereof, a watercress plant or part thereof, a lettuce plant or part thereof (e.g. romaine), a swiss chard plant or part thereof, an arugula plant or part thereof, an endive plant or part thereof, a bok choy plant or part thereof, a rutabaga plant or part thereof, a turnip plant or part thereof, a mustard plant or part thereof, a cabbage plant or part thereof, a broccoli plant or part thereof, a cauliflower plant or part thereof, a Brussels sprout plant or part thereof, a radish plant or part thereof, or a kohlrabi plant or part thereof.
